United States Patent Application Publication US 2024/0318200 A1 - sequence listing, part 2

SEQ ID NO: 6469 - DNA, 20 bp, synthetic construct
  misc_feature 1..20: note = Description of Artificial Sequence: Synthetic oligonucleotide
  misc_feature 1..20: note = Target: ANGPTL3; (+) strand; PAM type: NNNNGHTT; PAM sequence: CACGGCTT
  source 1..20: mol_type = other DNA
gttacattcgtgcaagttaa

SEQ ID NO: 6470 - DNA, 20 bp, synthetic construct
  misc_feature 1..20: note = Description of Artificial Sequence: Synthetic oligonucleotide
  misc_feature 1..20: note = Target: ANGPTL3; (+) strand; PAM type: NNNNGHTT; PAM sequence: TAATGATT
  source 1..20: mol_type = other DNA
tcgtgcaagttaacacggct

SEQ ID NO: 6471 - DNA, 20 bp, synthetic construct
  misc_feature 1..20: note = Description of Artificial Sequence: Synthetic oligonucleotide
  misc_feature 1..20: note = Target: ANGPTL3; (+) strand; PAM type: NNNNGHTT; PAM sequence: GTCTGCTT
  source 1..20: mol_type = other DNA
tatagagttaagaagtctag

SEQ ID NO: 6472 - DNA, 20 bp, synthetic construct
  misc_feature 1..20: note = Description of Artificial Sequence: Synthetic oligonucleotide
  misc_feature 1..20: note = Target: ANGPTL3; (+) strand; PAM type: NNNNGHTT; PAM sequence: CGTTGCTT
  source 1..20: mol_type = other DNA
tccagaagaaaacagttcca

SEQ ID NO: 6473 - DNA, 20 bp, synthetic construct
  misc_feature 1..20: note = Description of Artificial Sequence: Synthetic oligonucleotide
  misc_feature 1..20: note = Target: ANGPTL3; (+) strand; PAM type: NNNNGHTT; PAM sequence: ATTTGATT
  source 1..20: mol_type = other DNA
attgatcaagacaattcatc

SEQ ID NO: 6474 - DNA, 20 bp, synthetic construct
  misc_feature 1..20: note = Description of Artificial Sequence: Synthetic oligonucleotide
  misc_feature 1..20: note = Target: ANGPTL3; (+) strand; PAM type: NNNNGHTT; PAM sequence: TCAAGATT
  source 1..20: mol_type = other DNA
ctctatctccagagccaaaa

SEQ ID NO: 6475 - DNA, 20 bp, synthetic construct
  misc_feature 1..20: note = Description of Artificial Sequence: Synthetic oligonucleotide
  misc_feature 1..20: note = Target: ANGPTL3; (+) strand; PAM type: NNNNGHTT; PAM sequence: TCATGTTT
  source 1..20: mol_type = other DNA
aagtagaaaataaagagggt

SEQ ID NO: 6476 - DNA, 20 bp, synthetic construct
  misc_feature 1..20: note = Description of Artificial Sequence: Synthetic oligonucleotide
  misc_feature 1..20: note = Target: ANGPTL3; (+) strand; PAM type: NNNNGHTT; PAM sequence: TTATGTTT
  source 1..20: mol_type = other DNA
aaaataaagagggttcatgt

SEQ ID NO: 6477 - DNA, 20 bp, synthetic construct
  misc_feature 1..20: note = Description of Artificial Sequence: Synthetic oligonucleotide
  misc_feature 1..20: note = Target: ANGPTL3; (+) strand; PAM type: NNNNGHTT; PAM sequence: GTTAGTTT
  source 1..20: mol_type = other DNA
atttcctattataatttcaa

SEQ ID NO: 6478 - DNA, 20 bp, synthetic construct
  misc_feature 1..20: note = Description of Artificial Sequence: Synthetic oligonucleotide
  misc_feature 1..20: note = Target: ANGPTL3; (+) strand; PAM type: NNNNGHTT; PAM sequence: TTTTGTTT
  source 1..20: mol_type = other DNA
attataatttcaagttagtt

SEQ ID NO: 6479 - DNA, 20 bp, synthetic construct
  misc_feature 1..20: note = Description of Artificial Sequence: Synthetic oligonucleotide
  misc_feature 1..20: note = Target: ANGPTL3; (+) strand; PAM type: NNNNGHTT; PAM sequence: CAGTGTTT
  source 1..20: mol_type = other DNA
aaaaatttaaaactattctc

SEQ ID NO: 6480 - DNA, 20 bp, synthetic construct
  misc_feature 1..20: note = Description of Artificial Sequence: Synthetic oligonucleotide
  misc_feature 1..20: note = Target: ANGPTL3; (+) strand; PAM type: NNNNGHTT; PAM sequence: AACAGATT
  source 1..20: mol_type = other DNA
aactattctccagtgtttaa

SEQ ID NO: 6481 - DNA, 20 bp, synthetic construct
  misc_feature 1..20: note = Description of Artificial Sequence: Synthetic oligonucleotide
  misc_feature 1..20: note = Target: ANGPTL3; (+) strand; PAM type: NNNNGHTT; PAM sequence: AAAAGATT
  source 1..20: mol_type = other DNA
ttaaataatacagtaaatgg

SEQ ID NO: 6482 - DNA, 20 bp, synthetic construct
  misc_feature 1..20: note = Description of Artificial Sequence: Synthetic oligonucleotide
  misc_feature 1..20: note = Target: ANGPTL3; (+) strand; PAM type: NNNNGHTT; PAM sequence: CTGGGCTT
  source 1..20: mol_type = other DNA
tttattcatatgaaaatatg

SEQ ID NO: 6483 - DNA, 20 bp, synthetic construct
  misc_feature 1..20: note = Description of Artificial Sequence: Synthetic oligonucleotide
  misc_feature 1..20: note = Target: ANGPTL3; (+) strand; PAM type: NNNNGHTT; PAM sequence: ATTAGTTT
  source 1..20: mol_type = other DNA
attcatttttcaaatccatt

SEQ ID NO: 6484 - DNA, 20 bp, synthetic construct
  misc_feature 1..20: note = Description of Artificial Sequence: Synthetic oligonucleotide
  misc_feature 1..20: note = Target: ANGPTL3; (+) strand; PAM type: NNNNGHTT; PAM sequence: TTTAGATT
  source 1..20: mol_type = other DNA
atccattattagtttaaaaa

SEQ ID NO: 6485 - DNA, 20 bp, synthetic construct
  misc_feature 1..20: note = Description of Artificial Sequence: Synthetic oligonucleotide
  misc_feature 1..20: note = Target: ANGPTL3; (+) strand; PAM type: NNNNGHTT; PAM sequence: ACAAGCTT
  source 1..20: mol_type = other DNA
actgaatcctaaaattattt

SEQ ID NO: 6486 - DNA, 20 bp, synthetic construct
  misc_feature 1..20: note = Description of Artificial Sequence: Synthetic oligonucleotide
  misc_feature 1..20: note = Target: ANGPTL3; (+) strand; PAM type: NNNNGHTT; PAM sequence: CTCAGTTT
  source 1..20: mol_type = other DNA
attacttcacccctttatct

SEQ ID NO: 6487 - DNA, 20 bp, synthetic construct
  misc_feature 1..20: note = Description of Artificial Sequence: Synthetic oligonucleotide
  misc_feature 1..20: note = Target: ANGPTL3; (+) strand; PAM type: NNNNGHTT; PAM sequence: ATAGGATT
  source 1..20: mol_type = other DNA
caaagataataacagaactt

SEQ ID NO: 6488 - DNA, 20 bp, synthetic construct
  misc_feature 1..20: note = Description of Artificial Sequence: Synthetic oligonucleotide
  misc_feature 1..20: note = Target: ANGPTL3; (+) strand; PAM type: NNNNGHTT; PAM sequence: TCATGTTT
  source 1..20: mol_type = other DNA
ttactaaaattcaaattaga

SEQ ID NO: 6489 - DNA, 20 bp, synthetic construct
  misc_feature 1..20: note = Description of Artificial Sequence: Synthetic oligonucleotide
  misc_feature 1..20: note = Target: ANGPTL3; (+) strand; PAM type: NNNNGHTT; PAM sequence: AATAGCTT
  source 1..20: mol_type = other DNA
ctctttgctcaaaaccacac

SEQ ID NO: 6490 - DNA, 20 bp, synthetic construct
  misc_feature 1..20: note = Description of Artificial Sequence: Synthetic oligonucleotide
  misc_feature 1..20: note = Target: ANGPTL3; (+) strand; PAM type: NNNNGHTT; PAM sequence: CCAAGATT
  source 1..20: mol_type = other DNA
actcatattggctctttaga

SEQ ID NO: 6491 - DNA, 20 bp, synthetic construct
  misc_feature 1..20: note = Description of Artificial Sequence: Synthetic oligonucleotide
  misc_feature 1..20: note = Target: ANGPTL3; (+) strand; PAM type: NNNNGHTT; PAM sequence: GACCGCTT
  source 1..20: mol_type = other DNA
tcctctactctagttattct

SEQ ID NO: 6492 - DNA, 20 bp, synthetic construct
  misc_feature 1..20: note = Description of Artificial Sequence: Synthetic oligonucleotide
  misc_feature 1..20: note = Target: ANGPTL3; (+) strand; PAM type: NNNNGHTT; PAM sequence: TGTTGTTT
  source 1..20: mol_type = other DNA
cacctcaaagcctttgccct

SEQ ID NO: 6493 - DNA, 20 bp, synthetic construct
  misc_feature 1..20: note = Description of Artificial Sequence: Synthetic oligonucleotide
  misc_feature 1..20: note = Target: ANGPTL3; (+) strand; PAM type: NNNNGHTT; PAM sequence: CTCTGATT
  source 1..20: mol_type = other DNA
tggtatctacgtggcccact

SEQ ID NO: 6494 - DNA, 20 bp, synthetic construct
  misc_feature 1..20: note = Description of Artificial Sequence: Synthetic oligonucleotide
  misc_feature 1..20: note = Target: ANGPTL3; (+) strand; PAM type: NNNNGHTT; PAM sequence: CAGGGATT
  source 1..20: mol_type = other DNA
aaatgtaagctctgtgaata

SEQ ID NO: 6495 - DNA, 20 bp, synthetic construct
  misc_feature 1..20: note = Description of Artificial Sequence: Synthetic oligonucleotide
  misc_feature 1..20: note = Target: ANGPTL3; (+) strand; PAM type: NNNNGHTT; PAM sequence: CTATGATT
  source 1..20: mol_type = other DNA
tattcacacagaagcgtgtg

SEQ ID NO: 6496 - DNA, 20 bp, synthetic construct
  misc_feature 1..20: note = Description of Artificial Sequence: Synthetic oligonucleotide
  misc_feature 1..20: note = Target: ANGPTL3; (+) strand; PAM type: NNNNGHTT; PAM sequence: CTTGGATT
  source 1..20: mol_type = other DNA
gtgtgctatgattattatta

SEQ ID NO: 6497 - DNA, 20 bp, synthetic construct
  misc_feature 1..20: note = Description of Artificial Sequence: Synthetic oligonucleotide
  misc_feature 1..20: note = Target: ANGPTL3; (+) strand; PAM type: NNNNGHTT; PAM sequence: ACTTGTTT
  source 1..20: mol_type = other DNA
gtgaagtgacagagggaagc

SEQ ID NO: 6498 - DNA, 20 bp, synthetic construct
  misc_feature 1..20: note = Description of Artificial Sequence: Synthetic oligonucleotide
  misc_feature 1..20: note = Target: ANGPTL3; (+) strand; PAM type: NNNNGHTT; PAM sequence: AATAGTTT
  source 1..20: mol_type = other DNA
tgtattctaatatgcagtac

SEQ ID NO: 6499 - DNA, 20 bp, synthetic construct
  misc_feature 1..20: note = Description of Artificial Sequence: Synthetic oligonucleotide
  misc_feature 1..20: note = Target: ANGPTL3; (+) strand; PAM type: NNNNGHTT; PAM sequence: AGAGGATT
  source 1..20: mol_type = other DNA
tactctcaaacagctattca

SEQ ID NO: 6500 - DNA, 20 bp, synthetic construct
  misc_feature 1..20: note = Description of Artificial Sequence: Synthetic oligonucleotide
  misc_feature 1..20: note = Target: ANGPTL3; (+) strand; PAM type: NNNNGHTT; PAM sequence: AAAGGTTT
  source 1..20: mol_type = other DNA
taatgttagtagtgctgcta

SEQ ID NO: 6501 - DNA, 20 bp, synthetic construct
  misc_feature 1..20: note = Description of Artificial Sequence: Synthetic oligonucleotide
  misc_feature 1..20: note = Target: ANGPTL3; (+) strand; PAM type: NNNNGHTT; PAM sequence: TTTGGTTT
  source 1..20: mol_type = other DNA
aaggttttttatcaactact

SEQ ID NO: 6502 - DNA, 20 bp, synthetic construct
  misc_feature 1..20: note = Description of Artificial Sequence: Synthetic oligonucleotide
  misc_feature 1..20: note = Target: ANGPTL3; (+) strand; PAM type: NNNNGHTT; PAM sequence: CTATGATT
  source 1..20: mol_type = other DNA
cttttcaattatatctttta

SEQ ID NO: 6503 - DNA, 20 bp, synthetic construct
  misc_feature 1..20: note = Description of Artificial Sequence: Synthetic oligonucleotide
  misc_feature 1..20: note = Target: ANGPTL3; (+) strand; PAM type: NNNNGHTT; PAM sequence: TTCTGCTT
  source 1..20: mol_type = other DNA
ataatgcaagatattatata

SEQ ID NO: 6504 - DNA, 20 bp, synthetic construct
  misc_feature 1..20: note = Description of Artificial Sequence: Synthetic oligonucleotide
  misc_feature 1..20: note = Target: ANGPTL3; (+) strand; PAM type: NNNNGHTT; PAM sequence: ATATGTTT
  source 1..20: mol_type = other DNA
caacctgccaacatctacag

SEQ ID NO: 6505 - DNA, 20 bp, synthetic construct
  misc_feature 1..20: note = Description of Artificial Sequence: Synthetic oligonucleotide
  misc_feature 1..20: note = Target: ANGPTL3; (+) strand; PAM type: NNNNGHTT; PAM sequence: CTCTGTTT
  source 1..20: mol_type = other DNA
agtctctacttttggccttg

SEQ ID NO: 6506 - DNA, 20 bp, synthetic construct
  misc_feature 1..20: note = Description of Artificial Sequence: Synthetic oligonucleotide
  misc_feature 1..20: note = Target: ANGPTL3; (+) strand; PAM type: NNNNGHTT; PAM sequence: GTCTGCTT
  source 1..20: mol_type = other DNA
tgctctgttttccgaccaat

SEQ ID NO: 6507 - DNA, 20 bp, synthetic construct
  misc_feature 1..20: note = Description of Artificial Sequence: Synthetic oligonucleotide
  misc_feature 1..20: note = Target: ANGPTL3; (+) strand; PAM type: NNNNGHTT; PAM sequence: CCTTGCTT
  source 1..20: mol_type = other DNA
gaccaatgtctgcttttttg

SEQ ID NO: 6508 - DNA, 20 bp, synthetic construct
  misc_feature 1..20: note = Description of Artificial Sequence: Synthetic oligonucleotide
  misc_feature 1..20: note = Target: ANGPTL3; (+) strand; PAM type: NNNNGHTT; PAM sequence: CCCTGATT
  source 1..20: mol_type = other DNA
tttatcttattaaataatgt

SEQ ID NO: 6509 - DNA, 20 bp, synthetic construct
  misc_feature 1..20: note = Description of Artificial Sequence: Synthetic oligonucleotide
  misc_feature 1..20: note = Target: ANGPTL3; (+) strand; PAM type: NNNNGHTT; PAM sequence: CACTGTTT
  source 1..20: mol_type = other DNA
aatctgtacaatctgaataa

SEQ ID NO: 6510 - DNA, 20 bp, synthetic construct
  misc_feature 1..20: note = Description of Artificial Sequence: Synthetic oligonucleotide
  misc_feature 1..20: note = Target: ANGPTL3; (+) strand; PAM type: NNNNGHTT; PAM sequence: CTCAGATT
  source 1..20: mol_type = other DNA
ctgtacttctgacatcctta

SEQ ID NO: 6511 - DNA, 20 bp, synthetic construct
  misc_feature 1..20: note = Description of Artificial Sequence: Synthetic oligonucleotide
  misc_feature 1..20: note = Target: ANGPTL3; (+) strand; PAM type: NNNNGHTT; PAM sequence: AACAGATT
  source 1..20: mol_type = other DNA
tattcagtatcattttaaaa

SEQ ID NO: 6512 - DNA, 20 bp, synthetic construct
  misc_feature 1..20: note = Description of Artificial Sequence: Synthetic oligonucleotide
  misc_feature 1..20: note = Target: ANGPTL3; (+) strand; PAM type: NNNNGHTT; PAM sequence: GTGGGTTT
  source 1..20: mol_type = other DNA
catgatggtaagacactttg

SEQ ID NO: 6513 - DNA, 20 bp, synthetic construct
  misc_feature 1..20: note = Description of Artificial Sequence: Synthetic oligonucleotide
  misc_feature 1..20: note = Target: ANGPTL3; (+) strand; PAM type: NNNNGHTT; PAM sequence: ACTTGATT
  source 1..20: mol_type = other DNA
tcagagaaatacaaatatgg

SEQ ID NO: 6514 - DNA, 20 bp, synthetic construct
  misc_feature 1..20: note = Description of Artificial Sequence: Synthetic oligonucleotide
  misc_feature 1..20: note = Target: ANGPTL3; (+) strand; PAM type: NNNNGHTT; PAM sequence: GAAGGTTT
  source 1..20: mol_type = other DNA
cttgattattagataatata

SEQ ID NO: 6515 - DNA, 20 bp, synthetic construct
  misc_feature 1..20: note = Description of Artificial Sequence: Synthetic oligonucleotide
  misc_feature 1..20: note = Target: ANGPTL3; (+) strand; PAM type: NNNNGHTT; PAM sequence: TGCAGTTT
  source 1..20: mol_type = other DNA
cttagatgtgatcatggtat

SEQ ID NO: 6516 - DNA, 20 bp, synthetic construct
  misc_feature 1..20: note = Description of Artificial Sequence: Synthetic oligonucleotide
  misc_feature 1..20: note = Target: ANGPTL3; (+) strand; PAM type: NNNNGHTT; PAM sequence: TCCTGTTT
  source 1..20: mol_type = other DNA
agttttaaaggagaacaatc

SEQ ID NO: 6517 - DNA, 20 bp, synthetic construct
  misc_feature 1..20: note = Description of Artificial Sequence: Synthetic oligonucleotide
  misc_feature 1..20: note = Target: ANGPTL3; (+) strand; PAM type: NNNNGHTT; PAM sequence: AATAGTTT
  source 1..20: mol_type = other DNA
taattaattttttaaaagaa

SEQ ID NO: 6518 - DNA, 20 bp, synthetic construct
  misc_feature 1..20: note = Description of Artificial Sequence: Synthetic oligonucleotide
  misc_feature 1..20: note = Target: ANGPTL3; (+) strand; PAM type: NNNNGHTT; PAM sequence: AGATGATT
  source 1..20: mol_type = other DNA
taaaagaaaatagtttggta

SEQ ID NO: 6519 - DNA, 20 bp, synthetic construct
  misc_feature 1..20: note = Description of Artificial Sequence: Synthetic oligonucleotide
  misc_feature 1..20: note = Target: ANGPTL3; (+) strand; PAM type: NNNNGHTT; PAM sequence: AAATGCTT
  source 1..20: mol_type = other DNA
aataacacgccatctaagaa

SEQ ID NO: 6520 - DNA, 20 bp, synthetic construct
  misc_feature 1..20: note = Description of Artificial Sequence: Synthetic oligonucleotide
  misc_feature 1..20: note = Target: ANGPTL3; (+) strand; PAM type: NNNNGHTT; PAM sequence: TATTGATT
  source 1..20: mol_type = other DNA
aatctgatgtaataacattt

SEQ ID NO: 6521 - DNA, 20 bp, synthetic construct
  misc_feature 1..20: note = Description of Artificial Sequence: Synthetic oligonucleotide
  misc_feature 1..20: note = Target: ANGPTL3; (+) strand; PAM type: NNNNGHTT; PAM sequence: TCAAGTTT
  source 1..20: mol_type = other DNA
gccatcagacccagcaactc

SEQ ID NO: 6522 - DNA, 20 bp, synthetic construct
  misc_feature 1..20: note = Description of Artificial Sequence: Synthetic oligonucleotide
  misc_feature 1..20: note = Target: ANGPTL3; (+) strand; PAM type: NNNNGHTT; PAM sequence: GGAAGATT
  source 1..20: mol_type = other DNA
aacttactcattacgtatta

SEQ ID NO: 6523 - DNA, 20 bp, synthetic construct
  misc_feature 1..20: note = Description of Artificial Sequence: Synthetic oligonucleotide
  misc_feature 1..20: note = Target: ANGPTL3; (+) strand; PAM type: NNNNGHTT; PAM sequence: CATTGTTT
  source 1..20: mol_type = other DNA
aggaagattaacctggttat

SEQ ID NO: 6524 - DNA, 20 bp, synthetic construct
  misc_feature 1..20: note = Description of Artificial Sequence: Synthetic oligonucleotide
  misc_feature 1..20: note = Target: ANGPTL3; (+) strand; PAM type: NNNNGHTT; PAM sequence: CCTTGTTT
  source 1..20: mol_type = other DNA
gtataaatataatactttta

SEQ ID NO: 6525 - DNA, 20 bp, synthetic construct
  misc_feature 1..20: note = Description of Artificial Sequence: Synthetic oligonucleotide
  misc_feature 1..20: note = Target: ANGPTL3; (+) strand; PAM type: NNNNGHTT; PAM sequence: ATAAGTTT
  source 1..20: mol_type = other DNA
atctgaagtgactattatca

SEQ ID NO: 6526 - DNA, 20 bp, synthetic construct
  misc_feature 1..20: note = Description of Artificial Sequence: Synthetic oligonucleotide
  misc_feature 1..20: note = Target: ANGPTL3; (+) strand; PAM type: NNNNGHTT; PAM sequence: ACATGATT
  source 1..20: mol_type = other DNA
aacataaatctactaaaaat

SEQ ID NO: 6527 - DNA, 20 bp, synthetic construct
  misc_feature 1..20: note = Description of Artificial Sequence: Synthetic oligonucleotide
  misc_feature 1..20: note = Target: ANGPTL3; (+) strand; PAM type: NNNNGHTT; PAM sequence: TATGGTTT
  source 1..20: mol_type = other DNA
aaacgtgggagaactacaaa

SEQ ID NO: 6528 - DNA, 20 bp, synthetic construct
  misc_feature 1..20: note = Description of Artificial Sequence: Synthetic oligonucleotide
  misc_feature 1..20: note = Target: ANGPTL3; (+) strand; PAM type: NNNNGHTT; PAM sequence: GGAGGCTT
  source 1..20: mol_type = other DNA
gaactacaaatatggttttg

SEQ ID NO: 6529 - DNA, 20 bp, synthetic construct
  misc_feature 1..20: note = Description of Artificial Sequence: Synthetic oligonucleotide
  misc_feature 1..20: note = Target: ANGPTL3; (+) strand; PAM type: NNNNGHTT; PAM sequence: CACGGCTT
  source 1..20: mol_type = other DNA
tacttatcacaatttaattc

SEQ ID NO: 6530 - DNA, 20 bp, synthetic construct
  misc_feature 1..20: note = Description of Artificial Sequence: Synthetic oligonucleotide
  misc_feature 1..20: note = Target: ANGPTL3; (+) strand; PAM type: NNNNGHTT; PAM sequence: TTTTGATT
  source 1..20: mol_type = other DNA
actataattattaaagacaa

SEQ ID NO: 6531 - DNA, 20 bp, synthetic construct
  misc_feature 1..20: note = Description of Artificial Sequence: Synthetic oligonucleotide
  misc_feature 1..20: note = Target: ANGPTL3; (+) strand; PAM type: NNNNGHTT; PAM sequence: TAACGTTT
  source 1..20: mol_type = other DNA
tagtcactctattctctcat

SEQ ID NO: 6532 - DNA, 20 bp, synthetic construct
  misc_feature 1..20: note = Description of Artificial Sequence: Synthetic oligonucleotide
  misc_feature 1..20: note = Target: ANGPTL3; (+) strand; PAM type: NNNNGHTT; PAM sequence: TATGGCTT
  source 1..20: mol_type = other DNA
taaatataatatatagaatg

SEQ ID NO: 6533 - DNA, 20 bp, synthetic construct
  misc_feature 1..20: note = Description of Artificial Sequence: Synthetic oligonucleotide
  misc_feature 1..20: note = Target: ANGPTL3; (+) strand; PAM type: NNNNGHTT; PAM sequence: TTTTGATT
  source 1..20: mol_type = other DNA
actcaatgcaaattattcta

SEQ ID NO: 6534 - DNA, 20 bp, synthetic construct
  misc_feature 1..20: note = Description of Artificial Sequence: Synthetic oligonucleotide
  misc_feature 1..20: note = Target: ANGPTL3; (+) strand; PAM type: NNNNGHTT; PAM sequence: AGATGTTT
  source 1..20: mol_type = other DNA
aataagcaagataaaataac

SEQ ID NO: 6535 - DNA, 20 bp, synthetic construct
  misc_feature 1..20: note = Description of Artificial Sequence: Synthetic oligonucleotide
  misc_feature 1..20: note = Target: ANGPTL3; (+) strand; PAM type: NNNNGHTT; PAM sequence: ATAAGTTT
  source 1..20: mol_type = other DNA
cctagaaggtatactcagtg

SEQ ID NO: 6536 - DNA, 20 bp, synthetic construct
  misc_feature 1..20: note = Description of Artificial Sequence: Synthetic oligonucleotide
  misc_feature 1..20: note = Target: ANGPTL3; (+) strand; PAM type: NNNNGHTT; PAM sequence: TGAAGCTT
  source 1..20: mol_type = other DNA
tttaccagcaatccttaaaa

SEQ ID NO: 6537 - DNA, 20 bp, synthetic construct
  misc_feature 1..20: note = Description of Artificial Sequence: Synthetic oligonucleotide
  misc_feature 1..20: note = Target: ANGPTL3; (+) strand; PAM type: NNNNGHTT; PAM sequence: GAATGTTT
  source 1..20: mol_type = other DNA
aatagcaataagacaatagt

SEQ ID NO: 6538 - DNA, 20 bp, synthetic construct
  misc_feature 1..20: note = Description of Artificial Sequence: Synthetic oligonucleotide
  misc_feature 1..20: note = Target: ANGPTL3; (+) strand; PAM type: NNNNGHTT; PAM sequence: AAAGGATT
  source 1..20: mol_type = other DNA
ttttataaatactttaataa

SEQ ID NO: 6539 - DNA, 20 bp, synthetic construct
  misc_feature 1..20: note = Description of Artificial Sequence: Synthetic oligonucleotide
  misc_feature 1..20: note = Target: ANGPTL3; (+) strand; PAM type: NNNNGHTT; PAM sequence: ATTTGTTT
  source 1..20: mol_type = other DNA
acaatctatttatatttgtt

SEQ ID NO: 6540 - DNA, 20 bp, synthetic construct
  misc_feature 1..20: note = Description of Artificial Sequence: Synthetic oligonucleotide
  misc_feature 1..20: note = Target: ANGPTL3; (+) strand; PAM type: NNNNGHTT; PAM sequence: CCATGCTT
  source 1..20: mol_type = other DNA
cagaaaaaagttattaagaa

SEQ ID NO: 6541 - DNA, 20 bp, synthetic construct
  misc_feature 1..20: note = Description of Artificial Sequence: Synthetic oligonucleotide
  misc_feature 1..20: note = Target: ANGPTL3; (+) strand; PAM type: NNNNGHTT; PAM sequence: AAATGATT
  source 1..20: mol_type = other DNA
gaaccatgcttttaaattta

SEQ ID NO: 6542 - DNA, 20 bp, synthetic construct
  misc_feature 1..20: note = Description of Artificial Sequence: Synthetic oligonucleotide
  misc_feature 1..20: note = Target: ANGPTL3; (+) strand; PAM type: NNNNGHTT; PAM sequence: CCAGGTTT
  source 1..20: mol_type = other DNA
cattaagcaaataccaaagg

SEQ ID NO: 6543 - DNA, 20 bp, synthetic construct
  misc_feature 1..20: note = Description of Artificial Sequence: Synthetic oligonucleotide
  misc_feature 1..20: note = Target: ANGPTL3; (+) strand; PAM type: NNNNGHTT; PAM sequence: TAAAGTTT
  source 1..20: mol_type = other DNA
tgttaataaatagctgacag

SEQ ID NO: 6544 - DNA, 20 bp, synthetic construct
  misc_feature 1..20: note = Description of Artificial Sequence: Synthetic oligonucleotide
  misc_feature 1..20: note = Target: ANGPTL3; (+) strand; PAM type: NNNNGHTT; PAM sequence: AATTGTTT
  source 1..20: mol_type = other DNA
cacatagctatcttcaataa

SEQ ID NO: 6545 - DNA, 20 bp, synthetic construct
  misc_feature 1..20: note = Description of Artificial Sequence: Synthetic oligonucleotide
  misc_feature 1..20: note = Target: ANGPTL3; (+) strand; PAM type: NNNNGHTT; PAM sequence: AAGGGATT
  source 1..20: mol_type = other DNA
taagatacactaaaatgatc

SEQ ID NO: 6546 - DNA, 20 bp, synthetic construct
  misc_feature 1..20: note = Description of Artificial Sequence: Synthetic oligonucleotide
  misc_feature 1..20: note = Target: ANGPTL3; (+) strand; PAM type: NNNNGHTT; PAM sequence: CACAGATT
  source 1..20: mol_type = other DNA
ccaacctgtacttaataact

SEQ ID NO: 6547 - DNA, 20 bp, synthetic construct
  misc_feature 1..20: note = Description of Artificial Sequence: Synthetic oligonucleotide
  misc_feature 1..20: note = Target: ANGPTL3; (+) strand; PAM type: NNNNGHTT; PAM sequence: TTATGTTT
  source 1..20: mol_type = other DNA
tccatagtgaagcaatctaa

SEQ ID NO: 6548 - DNA, 20 bp, synthetic construct
  misc_feature 1..20: note = Description of Artificial Sequence: Synthetic oligonucleotide
  misc_feature 1..20: note = Target: ANGPTL3; (+) strand; PAM type: NNNNGHTT; PAM sequence: TTGCGATT
  source 1..20: mol_type = other DNA
caactatacgctacatctag

SEQ ID NO: 6549 - DNA, 20 bp, synthetic construct
  misc_feature 1..20: note = Description of Artificial Sequence: Synthetic oligonucleotide
  misc_feature 1..20: note = Target: ANGPTL3; (+) strand; PAM type: NNNNGHTT; PAM sequence: CAAAGATT
  source 1..20: mol_type = other DNA
cccaatgcaatcccggaaaa

SEQ ID NO: 6550 - DNA, 20 bp, synthetic construct
  misc_feature 1..20: note = Description of Artificial Sequence: Synthetic oligonucleotide
  misc_feature 1..20: note = Target: ANGPTL3; (+) strand; PAM type: NNNNGHTT; PAM sequence: TGGTGTTT
  source 1..20: mol_type = other DNA
aatcccggaaaacaaagatt

SEQ ID NO: 6551 - DNA, 20 bp, synthetic construct
  misc_feature 1..20: note = Description of Artificial Sequence: Synthetic oligonucleotide
  misc_feature 1..20: note = Target: ANGPTL3; (+) strand; PAM type: NNNNGHTT; PAM sequence: AAGCGTTT
  source 1..20: mol_type = other DNA
taaaaatccgaatcccaaat

SEQ ID NO: 6552 - DNA, 20 bp, synthetic construct
  misc_feature 1..20: note = Description of Artificial Sequence: Synthetic oligonucleotide
  misc_feature 1..20: note = Target: ANGPTL3; (+) strand; PAM type: NNNNGHTT; PAM sequence: CTCAGATT
  source 1..20: mol_type = other DNA
gtattttacctctaatcttc

SEQ ID NO: 6553 - DNA, 20 bp, synthetic construct
  misc_feature 1..20: note = Description of Artificial Sequence: Synthetic oligonucleotide
  misc_feature 1..20: note = Target: ANGPTL3; (+) strand; PAM type: NNNNGHTT; PAM sequence: TATAGATT
  source 1..20: mol_type = other DNA
ttttctattttttggtagtg

SEQ ID NO: 6554 - DNA, 20 bp, synthetic construct
  misc_feature 1..20: note = Description of Artificial Sequence: Synthetic oligonucleotide
  misc_feature 1..20: note = Target: ANGPTL3; (+) strand; PAM type: NNNNGHTT; PAM sequence: TACAGATT
  source 1..20: mol_type = other DNA
ggtagtgtatagattattta

SEQ ID NO: 6555 - DNA, 20 bp, synthetic construct
  misc_feature 1..20: note = Description of Artificial Sequence: Synthetic oligonucleotide
  misc_feature 1..20: note = Target: ANGPTL3; (+) strand; PAM type: NNNNGHTT; PAM sequence: TACAGATT
  source 1..20: mol_type = other DNA
ttatttaaaattgggactta

SEQ ID NO: 6556 - DNA, 20 bp, synthetic construct
  misc_feature 1..20: note = Description of Artificial Sequence: Synthetic oligonucleotide
  misc_feature 1..20: note = Target: ANGPTL3; (+) strand; PAM type: NNNNGHTT; PAM sequence: AGAGGATT
  source 1..20: mol_type = other DNA
aatctaagccagagaggaga

SEQ ID NO: 6557 - DNA, 20 bp, synthetic construct
  misc_feature 1..20: note = Description of Artificial Sequence: Synthetic oligonucleotide
  misc_feature 1..20: note = Target: ANGPTL3; (+) strand; PAM type: NNNNGHTT; PAM sequence: AACAGATT
  source 1..20: mol_type = other DNA
accaaaatgttgatccatcc

SEQ ID NO: 6558 - DNA, 20 bp, synthetic construct
  misc_feature 1..20: note = Description of Artificial Sequence: Synthetic oligonucleotide
  misc_feature 1..20: note = Target: ANGPTL3; (+) strand; PAM type: NNNNGHTT; PAM sequence: GAAAGCTT
  source 1..20: mol_type = other DNA
tgatccatccaacagattca

SEQ ID NO: 6559 - DNA, 20 bp, synthetic construct
  misc_feature 1..20: note = Description of Artificial Sequence: Synthetic oligonucleotide
  misc_feature 1..20: note = Target: ANGPTL3; (+) strand; PAM type: NNNNGHTT; PAM sequence: GAAAGCTT
  source 1..20: mol_type = other DNA
ctggtattaaatccttaaga

SEQ ID NO: 6560 - DNA, 20 bp, synthetic construct
  misc_feature 1..20: note = Description of Artificial Sequence: Synthetic oligonucleotide
  misc_feature 1..20: note = Target: ANGPTL3; (+) strand; PAM type: NNNNGHTT; PAM sequence: AATAGATT
  source 1..20: mol_type = other DNA
ccttaagagaaagcttgaga

SEQ ID NO: 6561 - DNA, 20 bp, synthetic construct
  misc_feature 1..20: note = Description of Artificial Sequence: Synthetic oligonucleotide
  misc_feature 1..20: note = Target: ANGPTL3; (+) strand; PAM type: NNNNGHTT; PAM sequence: TTAAGATT
  source 1..20: mol_type = other DNA
atcttaaagtcactgtctat

SEQ ID NO: 6562 - DNA, 20 bp, synthetic construct
  misc_feature 1..20: note = Description of Artificial Sequence: Synthetic oligonucleotide
  misc_feature 1..20: note = Target: ANGPTL3; (+) strand; PAM type: NNNNGHTT; PAM sequence: TACCGTTT
  source 1..20: mol_type = other DNA
aatcacataaccttaaagaa

SEQ ID NO: 6563 - DNA, 20 bp, synthetic construct
  misc_feature 1..20: note = Description of Artificial Sequence: Synthetic oligonucleotide
  misc_feature 1..20: note = Target: ANGPTL3; (+) strand; PAM type: NNNNGHTT; PAM sequence: ATTTGTTT
  source 1..20: mol_type = other DNA
atcaaaattcttataatact

SEQ ID NO: 6564 - DNA, 20 bp, synthetic construct
  misc_feature 1..20: note = Description of Artificial Sequence: Synthetic oligonucleotide
  misc_feature 1..20: note = Target: ANGPTL3; (+) strand; PAM type: NNNNGHTT; PAM sequence: TCTAGATT
  source 1..20: mol_type = other DNA
tcaattttagatggtcacaa

SEQ ID NO: 6565 - DNA, 20 bp, synthetic construct
  misc_feature 1..20: note = Description of Artificial Sequence: Synthetic oligonucleotide
  misc_feature 1..20: note = Target: ANGPTL3; (+) strand; PAM type: NNNNGHTT; PAM sequence: CCCAGTTT
  source 1..20: mol_type = other DNA
tgagctaatatcacaacttt

SEQ ID NO: 6566 - DNA, 20 bp, synthetic construct
  misc_feature 1..20: note = Description of Artificial Sequence: Synthetic oligonucleotide
  misc_feature 1..20: note = Target: ANGPTL3; (+) strand; PAM type: NNNNGHTT; PAM sequence: TGATGCTT
  source 1..20: mol_type = other DNA
tgtaatacaaatttttaaac

SEQ ID NO: 6567 - DNA, 20 bp, synthetic construct
  misc_feature 1..20: note = Description of Artificial Sequence: Synthetic oligonucleotide
  misc_feature 1..20: note = Target: ANGPTL3; (+) strand; PAM type: NNNNGHTT; PAM sequence: AAATGTTT
  source 1..20: mol_type = other DNA
gctacaaaataatttggagt

SEQ ID NO: 6568 - DNA, 20 bp, synthetic construct
  misc_feature 1..20: note = Description of Artificial Sequence: Synthetic oligonucleotide
  misc_feature 1..20: note = Target: ANGPTL3; (+) strand; PAM type: NNNNGHTT; PAM sequence: ATATGATT
  source 1..20: mol_type = other DNA
taatttggagtaaatgtttg

SEQ ID NO: 6569 - DNA, 20 bp, synthetic construct
  misc_feature 1..20: note = Description of Artificial Sequence: Synthetic oligonucleotide
  misc_feature 1..20: note = Target: ANGPTL3; (+) strand; PAM type: NNNNGHTT; PAM sequence: GTCAGATT
  source 1..20: mol_type = other DNA
aataattgtaaaggaatctt

SEQ ID NO: 6570 - DNA, 20 bp, synthetic construct
  misc_feature 1..20: note = Description of Artificial Sequence: Synthetic oligonucleotide
  misc_feature 1..20: note = Target: ANGPTL3; (+) strand; PAM type: NNNNGHTT; PAM sequence: TAAAGTTT
  source 1..20: mol_type = other DNA
acatatttgtggcatcgagt

SEQ ID NO: 6571 - DNA, 20 bp, synthetic construct
  misc_feature 1..20: note = Description of Artificial Sequence: Synthetic oligonucleotide
  misc_feature 1..20: note = Target: ANGPTL3; (+) strand; PAM type: NNNNGHTT; PAM sequence: CTGTGATT
  source 1..20: mol_type = other DNA
ttatatttcccctaaatatg

SEQ ID NO: 6572 - DNA, 20 bp, synthetic construct
  misc_feature 1..20: note = Description of Artificial Sequence: Synthetic oligonucleotide
  misc_feature 1..20: note = Target: ANGPTL3; (+) strand; PAM type: NNNNGHTT; PAM sequence: GTAGGTTT
  source 1..20: mol_type = other DNA
tgtgattctaatacattcgt

SEQ ID NO: 6573 - DNA, 20 bp, synthetic construct
  misc_feature 1..20: note = Description of Artificial Sequence: Synthetic oligonucleotide
  misc_feature 1..20: note = Target: ANGPTL3; (+) strand; PAM type: NNNNGHTT; PAM sequence: GAACGTTT
  source 1..20: mol_type = other DNA
aaacctcgtaacaagttact

SEQ ID NO: 6574 - DNA, 20 bp, synthetic construct
  misc_feature 1..20: note = Description of Artificial Sequence: Synthetic oligonucleotide
  misc_feature 1..20: note = Target: ANGPTL3; (+) strand; PAM type: NNNNGHTT; PAM sequence: ATATGTTT
  source 1..20: mol_type = other DNA
acagcctgacaagcatgtat

SEQ ID NO: 6575 - DNA, 20 bp, synthetic construct
  misc_feature 1..20: note = Description of Artificial Sequence: Synthetic oligonucleotide
  misc_feature 1..20: note = Target: ANGPTL3; (+) strand; PAM type: NNNNGHTT; PAM sequence: GCATGTTT
  source 1..20: mol_type = other DNA
tagaaatttaaattattctt

SEQ ID NO: 6576 - DNA, 20 bp, synthetic construct
  misc_feature 1..20: note = Description of Artificial Sequence: Synthetic oligonucleotide
  misc_feature 1..20: note = Target: ANGPTL3; (+) strand; PAM type: NNNNGHTT; PAM sequence: TAAAGATT
  source 1..20: mol_type = other DNA
tccctaaatccctaaatccc

SEQ ID NO: 6577 - DNA, 20 bp, synthetic construct
  misc_feature 1..20: note = Description of Artificial Sequence: Synthetic oligonucleotide
  misc_feature 1..20: note = Target: ANGPTL3; (+) strand; PAM type: NNNNGHTT; PAM sequence: ATATGATT
  source 1..20: mol_type = other DNA
ttgtcagaatttatttttaa

SEQ ID NO: 6578 - DNA, 20 bp, synthetic construct
  misc_feature 1..20: note = Description of Artificial Sequence: Synthetic oligonucleotide
  misc_feature 1..20: note = Target: ANGPTL3; (+) strand; PAM type: NNNNGHTT; PAM sequence: CGCTGATT
  source 1..20: mol_type = other DNA
gactaagctgtcgaaattaa

SEQ ID NO: 6579 - DNA, 20 bp, synthetic construct
  misc_feature 1..20: note = Description of Artificial Sequence: Synthetic oligonucleotide
  misc_feature 1..20: note = Target: ANGPTL3; (+) strand; PAM type: NNNNGHTT; PAM sequence: AGTTGCTT
  source 1..20: mol_type = other DNA
aattcattatttaatatatg

SEQ ID NO: 6580 - DNA, 20 bp, synthetic construct
  misc_feature 1..20: note = Description of Artificial Sequence: Synthetic oligonucleotide
  misc_feature 1..20: note = Target: ANGPTL3; (+) strand; PAM type: NNNNGHTT; PAM sequence: TTTGGTTT
  source 1..20: mol_type = other DNA
tatatgagttgcttcctcta

SEQ ID NO: 6581 - DNA, 20 bp, synthetic construct
  misc_feature 1..20: note = Description of Artificial Sequence: Synthetic oligonucleotide
  misc_feature 1..20: note = Target: ANGPTL3; (+) strand; PAM type: NNNNGHTT; PAM sequence: ACATGTTT
  source 1..20: mol_type = other DNA
aaaaaaaaaactctcatagg

SEQ ID NO: 6582 - DNA, 20 bp, synthetic construct
  misc_feature 1..20: note = Description of Artificial Sequence: Synthetic oligonucleotide
  misc_feature 1..20: note = Target: ANGPTL3; (+) strand; PAM type: NNNNGHTT; PAM sequence: AGACGTTT
  source 1..20: mol_type = other DNA
cctttcaggagtagtaaatt

SEQ ID NO: 6583 - DNA, 20 bp, synthetic construct
  misc_feature 1..20: note = Description of Artificial Sequence: Synthetic oligonucleotide
  misc_feature 1..20: note = Target: ANGPTL3; (+) strand; PAM type: NNNNGHTT; PAM sequence: TAAAGCTT
  source 1..20: mol_type = other DNA
aattagacgttttccccata

SEQ ID NO: 6584 - DNA, 20 bp, synthetic construct
  misc_feature 1..20: note = Description of Artificial Sequence: Synthetic oligonucleotide
  misc_feature 1..20: note = Target: ANGPTL3; (+) strand; PAM type: NNNNGHTT; PAM sequence: CTTTGCTT
  source 1..20: mol_type = other DNA
actgtctcctgtcctaacta

SEQ ID NO: 6585 - DNA, 20 bp, synthetic construct
  misc_feature 1..20: note = Description of Artificial Sequence: Synthetic oligonucleotide
  misc_feature 1..20: note = Target: ANGPTL3; (+) strand; PAM type: NNNNGHTT; PAM sequence: TTTTGCTT
  source 1..20: mol_type = other DNA
tttttcaaacttgaccttca

SEQ ID NO: 6586 - DNA, 20 bp, synthetic construct
  misc_feature 1..20: note = Description of Artificial Sequence: Synthetic oligonucleotide
  misc_feature 1..20: note = Target: ANGPTL3; (+) strand; PAM type: NNNNGHTT; PAM sequence: CATGGATT
  source 1..20: mol_type = other DNA
tttcacaatactatactctc

SEQ ID NO: 6587 - DNA, 20 bp, synthetic construct
  misc_feature 1..20: note = Description of Artificial Sequence: Synthetic oligonucleotide
  misc_feature 1..20: note = Target: ANGPTL3; (+) strand; PAM type: NNNNGHTT; PAM sequence: AATCGCTT
  source 1..20: mol_type = other DNA
tcaagaggctgagacaggag

SEQ ID NO: 6588 - DNA, 20 bp, synthetic construct
  misc_feature 1..20: note = Description of Artificial Sequence: Synthetic oligonucleotide
  misc_feature 1..20: note = Target: ANGPTL3; (+) strand; PAM type: NNNNGHTT; PAM sequence: TCTGGCTT
  source 1..20: mol_type = other DNA
cctggaacccggaagacatc

SEQ ID NO: 6589 - DNA, 20 bp, synthetic construct
  misc_feature 1..20: note = Description of Artificial Sequence: Synthetic oligonucleotide
  misc_feature 1..20: note = Target: ANGPTL3; (+) strand; PAM type: NNNNGHTT; PAM sequence: ATAAGCTT
  source 1..20: mol_type = other DNA
ttgaaacgtctcttaatctt

SEQ ID NO: 6590 - DNA, 20 bp, synthetic construct
  misc_feature 1..20: note = Description of Artificial Sequence: Synthetic oligonucleotide
  misc_feature 1..20: note = Target: ANGPTL3; (+) strand; PAM type: NNNNGHTT; PAM sequence: GCTAGATT
  source 1..20: mol_type = other DNA
agactgtctttaacttcagt

SEQ ID NO: 6591 - DNA, 20 bp, synthetic construct
  misc_feature 1..20: note = Description of Artificial Sequence: Synthetic oligonucleotide
  misc_feature 1..20: note = Target: ANGPTL3; (+) strand; PAM type: NNNNGHTT; PAM sequence: CTTAGCTT
  source 1..20: mol_type = other DNA
tttcagaatcttattgggat

SEQ ID NO: 6592 - DNA, 20 bp, synthetic construct
  misc_feature 1..20: note = Description of Artificial Sequence: Synthetic oligonucleotide
  misc_feature 1..20: note = Target: ANGPTL3; (+) strand; PAM type: NNNNGHTT; PAM sequence: TTGTGTTT
  source 1..20: mol_type = other DNA
actttaaaattgcatatgaa

SEQ ID NO: 6593 - DNA, 20 bp, synthetic construct
  misc_feature 1..20: note = Description of Artificial Sequence: Synthetic oligonucleotide
  misc_feature 1..20: note = Target: ANGPTL3; (+) strand; PAM type: NNNNGHTT; PAM sequence: TACTGCTT
  source 1..20: mol_type = other DNA
ttgggaggccggggcgggag

SEQ ID NO: 6594 - DNA, 20 bp, synthetic construct
  misc_feature 1..20: note = Description of Artificial Sequence: Synthetic oligonucleotide
  misc_feature 1..20: note = Target: ANGPTL3; (+) strand; PAM type: NNNNGHTT; PAM sequence: TCATGTTT
  source 1..20: mol_type = other DNA
tgatgttcctagaagatgtg

SEQ ID NO: 6595 - DNA, 20 bp, synthetic construct
  misc_feature 1..20: note = Description of Artificial Sequence: Synthetic oligonucleotide
  misc_feature 1..20: note = Target: ANGPTL3; (+) strand; PAM type: NNNNGHTT; PAM sequence: CCAGGTTT
  source 1..20: mol_type = other DNA
gaacaaaatccaaaatcctt

SEQ ID NO: 6596 - DNA, 20 bp, synthetic construct
  misc_feature 1..20: note = Description of Artificial Sequence: Synthetic oligonucleotide
  misc_feature 1..20: note = Target: ANGPTL3; (+) strand; PAM type: NNNNGHTT; PAM sequence: TTCTGATT
  source 1..20: mol_type = other DNA
tagaatgtctccccacacat

SEQ ID NO: 6597 - DNA, 20 bp, synthetic construct
  misc_feature 1..20: note = Description of Artificial Sequence: Synthetic oligonucleotide
  misc_feature 1..20: note = Target: ANGPTL3; (+) strand; PAM type: NNNNGHTT; PAM sequence: GCTAGATT
  source 1..20: mol_type = other DNA
tccccacacatttctgattg

SEQ ID NO: 6598 - DNA, 20 bp, synthetic construct
  misc_feature 1..20: note = Description of Artificial Sequence: Synthetic oligonucleotide
  misc_feature 1..20: note = Target: ANGPTL3; (+) strand; PAM type: NNNNGHTT; PAM sequence: GGCAGCTT
  source 1..20: mol_type = other DNA
ccacaaatattctagtaaat

SEQ ID NO: 6599 - DNA, 20 bp, synthetic construct
  misc_feature 1..20: note = Description of Artificial Sequence: Synthetic oligonucleotide
  misc_feature 1..20: note = Target: ANGPTL3; (+) strand; PAM type: NNNNGHTT; PAM sequence: GTCAGTTT
  source 1..20: mol_type = other DNA
ctccaaaagcatcaaagata

SEQ ID NO: 6600 - DNA, 20 bp, synthetic construct
  misc_feature 1..20: note = Description of Artificial Sequence: Synthetic oligonucleotide
  misc_feature 1..20: note = Target: ANGPTL3; (+) strand; PAM type: NNNNGHTT; PAM sequence: ACCTGATT
  source 1..20: mol_type = other DNA
gcatcaaagatagtcagttt

SEQ ID NO: 6601 - DNA, 20 bp, synthetic construct
  misc_feature 1..20: note = Description of Artificial Sequence: Synthetic oligonucleotide
  misc_feature 1..20: note = Target: ANGPTL3; (+) strand; PAM type: NNNNGHTT; PAM sequence: AAGAGTTT
  source 1..20: mol_type = other DNA
tactgaaaaatttctatatc

SEQ ID NO: 6602 - DNA, 20 bp, synthetic construct
  misc_feature 1..20: note = Description of Artificial Sequence: Synthetic oligonucleotide
  misc_feature 1..20: note = Target: ANGPTL3; (+) strand; PAM type: NNNNGHTT; PAM sequence: TCATGCTT
  source 1..20: mol_type = other DNA
atcctggaatcagcatattt

SEQ ID NO: 6603 - DNA, 20 bp, synthetic construct
  misc_feature 1..20: note = Description of Artificial Sequence: Synthetic oligonucleotide
  misc_feature 1..20: note = Target: ANGPTL3; (+) strand; PAM type: NNNNGHTT; PAM sequence: TTGTGATT
  source 1..20: mol_type = other DNA
tgtaggataatcaaatttcc

SEQ ID NO: 6604 - DNA, 20 bp, synthetic construct
  misc_feature 1..20: note = Description of Artificial Sequence: Synthetic oligonucleotide
  misc_feature 1..20: note = Target: ANGPTL3; (+) strand; PAM type: NNNNGHTT; PAM sequence: GAGTGATT
  source 1..20: mol_type = other DNA
gcacttatgtatgtactact

SEQ ID NO: 6605 - DNA, 20 bp, synthetic construct
  misc_feature 1..20: note = Description of Artificial Sequence: Synthetic oligonucleotide
  misc_feature 1..20: note = Target: ANGPTL3; (+) strand; PAM type: NNNNGHTT; PAM sequence: AGCAGTTT
  source 1..20: mol_type = other DNA
actgagtgattatcaaacac

SEQ ID NO: 6606 - DNA, 20 bp, synthetic construct
  misc_feature 1..20: note = Description of Artificial Sequence: Synthetic oligonucleotide
  misc_feature 1..20: note = Target: ANGPTL3; (+) strand; PAM type: NNNNGHTT; PAM sequence: TGAGGTTT
  source 1..20: mol_type = other DNA
tattataacccttaataaaa

SEQ ID NO: 6607 - DNA, 20 bp, synthetic construct
  misc_feature 1..20: note = Description of Artificial Sequence: Synthetic oligonucleotide
  misc_feature 1..20: note = Target: ANGPTL3; (+) strand; PAM type: NNNNGHTT; PAM sequence: GGCTGTTT
  source 1..20: mol_type = other DNA
aattctatctaaaatacaaa

SEQ ID NO: 6608 - DNA, 20 bp, synthetic construct
  misc_feature 1..20: note = Description of Artificial Sequence: Synthetic oligonucleotide
  misc_feature 1..20: note = Target: ANGPTL3; (+) strand; PAM type: NNNNGHTT; PAM sequence: TCATGTTT
  source 1..20: mol_type = other DNA
aaaggctgtttttcctaaat

SEQ ID NO: 6609 - DNA, 20 bp, synthetic construct
  misc_feature 1..20: note = Description of Artificial Sequence: Synthetic oligonucleotide
  misc_feature 1..20: note = Target: ANGPTL3; (+) strand; PAM type: NNNNGHTT; PAM sequence: CTCAGTTT
  source 1..20: mol_type = other DNA
cttaaaatacacagtcaaac

SEQ ID NO: 6610 - DNA, 20 bp, synthetic construct
  misc_feature 1..20: note = Description of Artificial Sequence: Synthetic oligonucleotide
  misc_feature 1..20: note = Target: ANGPTL3; (+) strand; PAM type: NNNNGHTT; PAM sequence: ATGGGATT
  source 1..20: mol_type = other DNA
gtcaaatctattaatacttc

SEQ ID NO: 6611 - DNA, 20 bp, synthetic construct
  misc_feature 1..20: note = Description of Artificial Sequence: Synthetic oligonucleotide
  misc_feature 1..20: note = Target: ANGPTL3; (+) strand; PAM type: NNNNGHTT; PAM sequence: AATAGCTT
  source 1..20: mol_type = other DNA
caagccagataatgtatttg

SEQ ID NO: 6612 - DNA, 20 bp, synthetic construct
  misc_feature 1..20: note = Description of Artificial Sequence: Synthetic oligonucleotide
  misc_feature 1..20: note = Target: ANGPTL3; (+) strand; PAM type: NNNNGHTT; PAM sequence: AAACGCTT
  source 1..20: mol_type = other DNA
tttaagtaaataatctctac

SEQ ID NO: 6613 - DNA, 20 bp, synthetic construct
  misc_feature 1..20: note = Description of Artificial Sequence: Synthetic oligonucleotide
  misc_feature 1..20: note = Target: ANGPTL3; (+) strand; PAM type: NNNNGHTT; PAM sequence: CAGAGTTT
  source 1..20: mol_type = other DNA
aagaacaaaactgcccttct

SEQ ID NO: 6614 - DNA, 20 bp, synthetic construct
  misc_feature 1..20: note = Description of Artificial Sequence: Synthetic oligonucleotide
  misc_feature 1..20: note = Target: ANGPTL3; (+) strand; PAM type: NNNNGHTT; PAM sequence: ATCTGTTT
  source 1..20: mol_type = other DNA
ctgcccttctcagagtttgc

SEQ ID NO: 6615 - DNA, 20 bp, synthetic construct
  misc_feature 1..20: note = Description of Artificial Sequence: Synthetic oligonucleotide
  misc_feature 1..20: note = Target: ANGPTL3; (+) strand; PAM type: NNNNGHTT; PAM sequence: AAGTGATT
  source 1..20: mol_type = other DNA
aacctccgcctcctgggttc

SEQ ID NO: 6616 - DNA, 20 bp, synthetic construct
  misc_feature 1..20: note = Description of Artificial Sequence: Synthetic oligonucleotide
  misc_feature 1..20: note = Target: ANGPTL3; (+) strand; PAM type: NNNNGHTT; PAM sequence: CTAGGATT
  source 1..20: mol_type = other DNA
tgcctcagactcctgagtag

SEQ ID NO: 6617 - DNA, 20 bp, synthetic construct
  misc_feature 1..20: note = Description of Artificial Sequence: Synthetic oligonucleotide
  misc_feature 1..20: note = Target: ANGPTL3; (+) strand; PAM type: NNNNGHTT; PAM sequence: CGGAGTTT
  source 1..20: mol_type = other DNA
ttttgtatttttagtagaga

SEQ ID NO: 6618 - DNA, 20 bp, synthetic construct
  misc_feature 1..20: note = Description of Artificial Sequence: Synthetic oligonucleotide
  misc_feature 1..20: note = Target: ANGPTL3; (+) strand; PAM type: NNNNGHTT; PAM sequence: CTAAGATT
  source 1..20: mol_type = other DNA
ttcctcggcctcccaaagtg

SEQ ID NO: 6619 - DNA, 20 bp, synthetic construct
  misc_feature 1..20: note = Description of Artificial Sequence: Synthetic oligonucleotide
  misc_feature 1..20: note = Target: ANGPTL3; (+) strand; PAM type: NNNNGHTT; PAM sequence: CTCAGTTT
  source 1..20: mol_type = other DNA
gagcccccgcgcccagccga

SEQ ID NO: 6620 - DNA, 20 bp, synthetic construct
  misc_feature 1..20: note = Description of Artificial Sequence: Synthetic oligonucleotide
  misc_feature 1..20: note = Target: ANGPTL3; (+) strand; PAM type: NNNNGHTT; PAM sequence: AGTAGCTT
  source 1..20: mol_type = other DNA
aaaatagcagagtatgtggc

SEQ ID NO: 6621 - DNA, 20 bp, synthetic construct
  misc_feature 1..20: note = Description of Artificial Sequence: Synthetic oligonucleotide
  misc_feature 1..20: note = Target: ANGPTL3; (+) strand; PAM type: NNNNGHTT; PAM sequence: ATAAGATT
  source 1..20: mol_type = other DNA
cacagcagtattaccagtat

SEQ ID NO: 6622 - DNA, 20 bp, synthetic construct
  misc_feature 1..20: note = Description of Artificial Sequence: Synthetic oligonucleotide
  misc_feature 1..20: note = Target: ANGPTL3; (+) strand; PAM type: NNNNGHTT; PAM sequence: TGCAGTTT
  source 1..20: mol_type = other DNA
tgggatacatgcgcagaacg

SEQ ID NO: 6623 - DNA, 20 bp, synthetic construct
  misc_feature 1..20: note = Description of Artificial Sequence: Synthetic oligonucleotide
  misc_feature 1..20: note = Target: ANGPTL3; (+) strand; PAM type: NNNNGHTT; PAM sequence: GGTGGTTT
  source 1..20: mol_type = other DNA
cataggtatacacgtggtat

SEQ ID NO: 6624 - DNA, 20 bp, synthetic construct
  misc_feature 1..20: note = Description of Artificial Sequence: Synthetic oligonucleotide
  misc_feature 1..20: note = Target: ANGPTL3; (+) strand; PAM type: NNNNGHTT; PAM sequence: CATTGTTT
  source 1..20: mol_type = other DNA
tccctgtgtccatgtgttct

SEQ ID NO: 6625 - DNA, 20 bp, synthetic construct
  misc_feature 1..20: note = Description of Artificial Sequence: Synthetic oligonucleotide
  misc_feature 1..20: note = Target: ANGPTL3; (+) strand; PAM type: NNNNGHTT; PAM sequence: TGGTGTTT
  source 1..20: mol_type = other DNA
cacttatgagtgagaacatg

SEQ ID NO: 6626 - DNA, 20 bp, synthetic construct
  misc_feature 1..20: note = Description of Artificial Sequence: Synthetic oligonucleotide
  misc_feature 1..20: note = Target: ANGPTL3; (+) strand; PAM type: NNNNGHTT; PAM sequence: TTTGGTTT
  source 1..20: mol_type = other DNA
atgagtgagaacatgtggtg

SEQ ID NO: 6627 - DNA, 20 bp, synthetic construct
  misc_feature 1..20: note = Description of Artificial Sequence: Synthetic oligonucleotide
  misc_feature 1..20: note = Target: ANGPTL3; (+) strand; PAM type: NNNNGHTT; PAM sequence: GTTAGTTT
  source 1..20: mol_type = other DNA
gtttggttttctgttcctgt

SEQ ID NO: 6628 - DNA, 20 bp, synthetic construct
  misc_feature 1..20: note = Description of Artificial Sequence: Synthetic oligonucleotide
  misc_feature 1..20: note = Target: ANGPTL3; (+) strand; PAM type: NNNNGHTT; PAM sequence: GATGGTTT
  source 1..20: mol_type = other DNA
tgtgttagtttgctgagaat

SEQ ID NO: 6629 - DNA, 20 bp, synthetic construct
  misc_feature 1..20: note = Description of Artificial Sequence: Synthetic oligonucleotide
  misc_feature 1..20: note = Target: ANGPTL3; (+) strand; PAM type: NNNNGHTT; PAM sequence: TCCAGCTT
  source 1..20: mol_type = other DNA
gtttgctgagaatgatggtt

SEQ ID NO: 6630 - DNA, 20 bp, synthetic construct
  misc_feature 1..20: note = Description of Artificial Sequence: Synthetic oligonucleotide
  misc_feature 1..20: note = Target: ANGPTL3; (+) strand; PAM type: NNNNGHTT; PAM sequence: GAATGATT
  source 1..20: mol_type = other DNA
gtgcatgtgtctttatagta

SEQ ID NO: 6631 - DNA, 20 bp, synthetic construct
  misc_feature 1..20: note = Description of Artificial Sequence: Synthetic oligonucleotide
  misc_feature 1..20: note = Target: ANGPTL3; (+) strand; PAM type: NNNNGHTT; PAM sequence: ATGGGATT
  source 1..20: mol_type = other DNA
ctttgaatatatacccaata

SEQ ID NO: 6632 - DNA, 20 bp, synthetic construct
  misc_feature 1..20: note = Description of Artificial Sequence: Synthetic oligonucleotide
  misc_feature 1..20: note = Target: ANGPTL3; (+) strand; PAM type: NNNNGHTT; PAM sequence: TGATGCTT
  source 1..20: mol_type = other DNA
tagacatctcaaaatattgt

SEQ ID NO: 6633 - DNA, 20 bp, synthetic construct
  misc_feature 1..20: note = Description of Artificial Sequence: Synthetic oligonucleotide
  misc_feature 1..20: note = Target: ANGPTL3; (+) strand; PAM type: NNNNGHTT; PAM sequence: AATAGTTT
  source 1..20: mol_type = other DNA
tattactatttagaaaatac

SEQ ID NO: 6634 - DNA, 20 bp, synthetic construct
  misc_feature 1..20: note = Description of Artificial Sequence: Synthetic oligonucleotide
  misc_feature 1..20: note = Target: ANGPTL3; (-) strand; PAM type: NRG; PAM sequence: TGG
  source 1..20: mol_type = other DNA
ttttcttcctcctgcgttta

SEQ ID NO: 6635 - DNA, 20 bp, synthetic construct
  misc_feature 1..20: note = Description of Artificial Sequence: Synthetic oligonucleotide
  misc_feature 1..20: note = Target: ANGPTL3; (-) strand; PAM type: NRG; PAM sequence: CAG
  source 1..20: mol_type = other DNA
taacaaacaatagatttttt

SEQ ID NO: 6636 - DNA, 20 bp, synthetic construct
  misc_feature 1..20: note = Description of Artificial Sequence: Synthetic oligonucleotide
  misc_feature 1..20: note = Target: ANGPTL3; (-) strand; PAM type: NRG; PAM sequence: TAG
  source 1..20: mol_type = other DNA
gttatatatataacaaacaa

SEQ ID NO: 6637 - DNA, 20 bp, synthetic construct
  misc_feature 1..20: note = Description of Artificial Sequence: Synthetic oligonucleotide
  misc_feature 1..20: note = Target: ANGPTL3; (-) strand; PAM type: NRG; PAM sequence: TGG
  source 1..20: mol_type = other DNA
taggaattatttacatattg

SEQ ID NO: 6638 - DNA, 20 bp, synthetic construct
  misc_feature 1..20: note = Description of Artificial Sequence: Synthetic oligonucleotide
  misc_feature 1..20: note = Target: ANGPTL3; (-) strand; PAM type: NRG; PAM sequence: AGG
  source 1..20: mol_type = other DNA
gtctctttctgactaatttt

SEQ ID NO: 6639 - DNA, 20 bp, synthetic construct
  misc_feature 1..20: note = Description of Artificial Sequence: Synthetic oligonucleotide
  misc_feature 1..20: note = Target: ANGPTL3; (-) strand; PAM type: NRG; PAM sequence: TAG
  source 1..20: mol_type = other DNA
tgtctctttctgactaattt

SEQ ID NO: 6640 - DNA, 20 bp, synthetic construct
  misc_feature 1..20: note = Description of Artificial Sequence: Synthetic oligonucleotide
  misc_feature 1..20: note = Target: ANGPTL3; (-) strand; PAM type: NRG; PAM sequence: AAG
  source 1..20: mol_type = other DNA
ctccttgttaccctcttttt

SEQ ID NO: 6641 - DNA, 20 bp, synthetic construct
  misc_feature 1..20: note = Description of Artificial Sequence: Synthetic oligonucleotide
  misc_feature 1..20: note = Target: ANGPTL3; (-) strand; PAM type: NRG; PAM sequence: TGG
  source 1..20: mol_type = other DNA
tgccgtctttgcgaatcatc

SEQ ID NO: 6642 - DNA, 20 bp, synthetic construct
  misc_feature 1..20: note = Description of Artificial Sequence: Synthetic oligonucleotide
  misc_feature 1..20: note = Target: ANGPTL3; (-) strand; PAM type: NRG; PAM sequence: TGG
  source 1..20: mol_type = other DNA
atatatctagtttgttttgc

SEQ ID NO: 6643 - DNA, 20 bp, synthetic construct
  misc_feature 1..20: note = Description of Artificial Sequence: Synthetic oligonucleotide
  misc_feature 1..20: note = Target: ANGPTL3; (-) strand; PAM type: NRG; PAM sequence: TAG
  source 1..20: mol_type = other DNA
ctaatagacaagtatatatc

SEQ ID NO: 6644 - DNA, 20 bp, synthetic construct
  misc_feature 1..20: note = Description of Artificial Sequence: Synthetic oligonucleotide
  misc_feature 1..20: note = Target: ANGPTL3; (-) strand; PAM type: NRG; PAM sequence: AAG
  source 1..20: mol_type = other DNA
tgttgataaatctaatagac

SEQ ID NO: 6645 - DNA, 20 bp, synthetic construct
  misc_feature 1..20: note = Description of Artificial Sequence: Synthetic oligonucleotide
  misc_feature 1..20: note = Target: ANGPTL3; (-) strand; PAM type: NRG; PAM sequence: TAG
  source 1..20: mol_type = other DNA
aaaaatgttgataaatctaa

SEQ ID NO: 6646 - DNA, 20 bp, synthetic construct
  misc_feature 1..20: note = Description of Artificial Sequence: Synthetic oligonucleotide
  misc_feature 1..20: note = Target: ANGPTL3; (-) strand; PAM type: NRG; PAM sequence: AGG
  source 1..20: mol_type = other DNA
acaaatgcttttaatgaaaa

SEQ ID NO: 6647 - DNA, 20 bp, synthetic construct
  misc_feature 1..20: note = Description of Artificial Sequence: Synthetic oligonucleotide
  misc_feature 1..20: note = Target: ANGPTL3; (-) strand; PAM type: NRG; PAM sequence: AAG
  source 1..20: mol_type = other DNA
tacaaatgcttttaatgaaa

SEQ ID NO: 6648 - DNA, 20 bp, synthetic construct
  misc_feature 1..20: note = Description of Artificial Sequence: Synthetic oligonucleotide
  misc_feature 1..20: note = Target: ANGPTL3; (-) strand; PAM type: NRG; PAM sequence: GAG
  source 1..20: mol_type = other DNA
tccctgccaggagtatatga

SEQ ID NO: 6649 - DNA, 20 bp, synthetic construct
  misc_feature 1..20: note = Description of Artificial Sequence: Synthetic oligonucleotide
  misc_feature 1..20: note = Target: ANGPTL3; (-) strand; PAM type: NRG; PAM sequence: GAG
  source 1..20: mol_type = other DNA
catccctgccaggagtatat

SEQ ID NO: 6650 - DNA, 20 bp, synthetic construct
  misc_feature 1..20: note = Description of Artificial Sequence: Synthetic oligonucleotide
  misc_feature 1..20: note = Target: ANGPTL3; (-) strand; PAM type: NRG; PAM sequence: GAG
  source 1..20: mol_type = other DNA
ccaatttacatccctgccag

SEQ ID NO: 6651 - DNA, 20 bp, synthetic construct
  misc_feature 1..20: note = Description of Artificial Sequence: Synthetic oligonucleotide
  misc_feature 1..20: note = Target: ANGPTL3; (-) strand; PAM type: NRG; PAM sequence: AGG
  source 1..20: mol_type = other DNA
taccaatttacatccctgcc

SEQ ID NO: 6652 - DNA, 20 bp, synthetic construct
  misc_feature 1..20: note = Description of Artificial Sequence: Synthetic oligonucleotide
  misc_feature 1..20: note = Target: ANGPTL3; (-) strand; PAM type: NRG; PAM sequence: CAG
  source 1..20: mol_type = other DNA
gtaccaatttacatccctgc

SEQ ID NO: 6653 - DNA, 20 bp, synthetic construct
  misc_feature 1..20: note = Description of Artificial Sequence: Synthetic oligonucleotide
  misc_feature 1..20: note = Target: ANGPTL3; (-) strand; PAM type: NRG; PAM sequence: GGG
  source 1..20: mol_type = other DNA
tgtcagattgtccttcaaaa

SEQ ID NO: 6654 - DNA, 20 bp, synthetic construct
  misc_feature 1..20: note = Description of Artificial Sequence: Synthetic oligonucleotide
  misc_feature 1..20: note = Target: ANGPTL3; (-) strand; PAM type: NRG; PAM sequence: AGG
  source 1..20: mol_type = other DNA
ttgtcagattgtccttcaaa

SEQ ID NO: 6655 - DNA, 20 bp, synthetic construct
  misc_feature 1..20: note = Description of Artificial Sequence: Synthetic oligonucleotide
  misc_feature 1..20: note = Target: ANGPTL3; (-) strand; PAM type: NRG; PAM sequence: AAG
  source 1..20: mol_type = other DNA
tttgtcagattgtccttcaa

SEQ ID NO: 6656 - DNA, 20 bp, synthetic construct
  misc_feature 1..20: note = Description of Artificial Sequence: Synthetic oligonucleotide
  misc_feature 1..20: note = Target: ANGPTL3; (-) strand; PAM type: NRG; PAM sequence: CAG
  source 1..20: mol_type = other DNA
taacttacgattgcttttgt

SEQ ID NO: 6657 - DNA, 20 bp, synthetic construct
  misc_feature 1..20: note = Description of Artificial Sequence: Synthetic oligonucleotide
  misc_feature 1..20: note = Target: ANGPTL3; (-) strand; PAM type: NRG; PAM sequence: TAG
  source 1..20: mol_type = other DNA
aatattttcatatacattca

SEQ ID NO: 6658 - DNA, 20 bp, synthetic construct
  misc_feature 1..20: note = Description of Artificial Sequence: Synthetic oligonucleotide
  misc_feature 1..20: note = Target: ANGPTL3; (-) strand; PAM type: NRG; PAM sequence: TGG
  source 1..20: mol_type = other DNA
tatagaaaatgcttttatgg

SEQ ID NO: 6659 - DNA, 20 bp, synthetic construct
  misc_feature 1..20: note = Description of Artificial Sequence: Synthetic oligonucleotide
  misc_feature 1..20: note = Target: ANGPTL3; (-) strand; PAM type: NRG; PAM sequence: TGG
  source 1..20: mol_type = other DNA
atgtatagaaaatgctttta

SEQ ID NO: 6660 - DNA, 20 bp, synthetic construct
  misc_feature 1..20: note = Description of Artificial Sequence: Synthetic oligonucleotide
  misc_feature 1..20: note = Target: ANGPTL3; (-) strand; PAM type: NRG; PAM sequence: TAG
  source 1..20: mol_type = other DNA
ctaattataaacagtatgta

SEQ ID NO: 6661 - DNA, 20 bp, synthetic construct
  misc_feature 1..20: note = Description of Artificial Sequence: Synthetic oligonucleotide
  misc_feature 1..20: note = Target: ANGPTL3; (-) strand; PAM type: NRG; PAM sequence: CAG
  source 1..20: mol_type = other DNA
tccaattttctaattataaa

SEQ ID NO: 6662 - DNA, 20 bp, synthetic construct
  misc_feature 1..20: note = Description of Artificial Sequence: Synthetic oligonucleotide
  misc_feature 1..20: note = Target: ANGPTL3; (-) strand; PAM type: NRG; PAM sequence: CAG
  source 1..20: mol_type = other DNA
tagatgaaccttaatttaat

SEQ ID NO: 6663 - DNA, 20 bp, synthetic construct
  misc_feature 1..20: note = Description of Artificial Sequence: Synthetic oligonucleotide
  misc_feature 1..20: note = Target: ANGPTL3; (-) strand; PAM type: NRG; PAM sequence: TAG
  source 1..20: mol_type = other DNA
agctgcataatcctgttata

SEQ ID NO: 6664 - DNA, 20 bp, synthetic construct
  misc_feature 1..20: note = Description of Artificial Sequence: Synthetic oligonucleotide
  misc_feature 1..20: note = Target: ANGPTL3; (-) strand; PAM type: NRG; PAM sequence: TAG
  source 1..20: mol_type = other DNA
agttaccacgtcctttttaa

SEQ ID NO: 6665 - DNA, 20 bp, synthetic construct
  misc_feature 1..20: note = Description of Artificial Sequence: Synthetic oligonucleotide
  misc_feature 1..20: note = Target: ANGPTL3; (-) strand; PAM type: NRG; PAM sequence: GAG
  source 1..20: mol_type = other DNA
ttttcctatgaatgtctata

SEQ ID NO: 6666 - DNA, 20 bp, synthetic construct
  misc_feature 1..20: note = Description of Artificial Sequence: Synthetic oligonucleotide
  misc_feature 1..20: note = Target: ANGPTL3; (-) strand; PAM type: NRG; PAM sequence: TAG
  source 1..20: mol_type = other DNA
tattttcctatgaatgtcta

SEQ ID NO: 6667 - DNA, 20 bp, synthetic construct
  misc_feature 1..20: note = Description of Artificial Sequence: Synthetic oligonucleotide
  misc_feature 1..20: note = Target: ANGPTL3; (-) strand; PAM type: NRG; PAM sequence: TAG
  source 1..20: mol_type = other DNA
atatatatcattcaggatct

SEQ ID NO: 6668 - DNA, 20 bp, synthetic construct
  misc_feature 1..20: note = Description of Artificial Sequence: Synthetic oligonucleotide
  misc_feature 1..20: note = Target: ANGPTL3; (-) strand; PAM type: NRG; PAM sequence: AGG
  source 1..20: mol_type = other DNA
tcatgatatatatatcattc

SEQ ID NO: 6669 - DNA, 20 bp, synthetic construct
  misc_feature 1..20: note = Description of Artificial Sequence: Synthetic oligonucleotide
  misc_feature 1..20: note = Target: ANGPTL3; (-) strand; PAM type: NRG; PAM sequence: CAG
  source 1..20: mol_type = other DNA
ctcatgatatatatatcatt

SEQ ID NO: 6670 - DNA, 20 bp, synthetic construct
  misc_feature 1..20: note = Description of Artificial Sequence: Synthetic oligonucleotide
  misc_feature 1..20: note = Target: ANGPTL3; (-) strand; PAM type: NRG; PAM sequence: TAG
  source 1..20: mol_type = other DNA
tgggatcttgttatgtataa

SEQ ID NO: 6671 - DNA, 20 bp, synthetic construct
  misc_feature 1..20: note = Description of Artificial Sequence: Synthetic oligonucleotide
  misc_feature 1..20: note = Target: ANGPTL3; (-) strand; PAM type: NRG; PAM sequence: GGG
  source 1..20: mol_type = other DNA
taattttttataacacaagt

SEQ ID NO: 6672 - DNA, 20 bp, synthetic construct
  misc_feature 1..20: note = Description of Artificial Sequence: Synthetic oligonucleotide
  misc_feature 1..20: note = Target: ANGPTL3; (-) strand; PAM type: NRG; PAM sequence: TGG
  source 1..20: mol_type = other DNA
ataattttttataacacaag

SEQ ID NO: 6673 - DNA, 20 bp, synthetic construct
  misc_feature 1..20: note = Description of Artificial Sequence: Synthetic oligonucleotide
  misc_feature 1..20: note = Target: ANGPTL3; (-) strand; PAM type: NRG; PAM sequence: AAG
  source 1..20: mol_type = other DNA
aacataattttttataacac

SEQ ID NO: 6674 - DNA, 20 bp, synthetic construct
  misc_feature 1..20: note = Description of Artificial Sequence: Synthetic oligonucleotide
  misc_feature 1..20: note = Target: ANGPTL3; (-) strand; PAM type: NRG; PAM sequence: CAG
  source 1..20: mol_type = other DNA
acattttgggtctatcatac

SEQ ID NO: 6675 - DNA, 20 bp, synthetic construct
  misc_feature 1..20: note = Description of Artificial Sequence: Synthetic oligonucleotide
  misc_feature 1..20: note = Target: ANGPTL3; (-) strand; PAM type: NRG; PAM sequence: GGG
  source 1..20: mol_type = other DNA
ctcgactctattaacatttt

SEQ ID NO: 6676 - DNA, 20 bp, synthetic construct
  misc_feature 1..20: note = Description of Artificial Sequence: Synthetic oligonucleotide
  misc_feature 1..20: note = Target: ANGPTL3; (-) strand; PAM type: NRG; PAM sequence: TGG
  source 1..20: mol_type = other DNA
tctcgactctattaacattt

SEQ ID NO: 6677 - DNA, 20 bp, synthetic construct
  misc_feature 1..20: note = Description of Artificial Sequence: Synthetic oligonucleotide
  misc_feature 1..20: note = Target: ANGPTL3; (-) strand; PAM type: NRG; PAM sequence: AGG
  source 1..20: mol_type = other DNA
agtacttattgtgaaaattc

SEQ ID NO: 6678 - DNA, 20 bp, synthetic construct
  misc_feature 1..20: note = Description of Artificial Sequence: Synthetic oligonucleotide
  misc_feature 1..20: note = Target: ANGPTL3; (-) strand; PAM type: NRG; PAM sequence: CAG
  source 1..20: mol_type = other DNA
aagtacttattgtgaaaatt

SEQ ID NO: 6679 - DNA, 20 bp, synthetic construct
  misc_feature 1..20: note = Description of Artificial Sequence: Synthetic oligonucleotide
  misc_feature 1..20: note = Target: ANGPTL3; (-) strand; PAM type: NRG; PAM sequence: AAG
  source 1..20: mol_type = other DNA
gctaagatttttaatgtgca

SEQ ID NO: 6680 - DNA, 20 bp, synthetic construct
  misc_feature 1..20: note = Description of Artificial Sequence: Synthetic oligonucleotide
  misc_feature 1..20: note = Target: ANGPTL3; (-) strand; PAM type: NRG; PAM sequence: AAG
  source 1..20: mol_type = other DNA
gtgagccaccatgcccagct

SEQ ID NO: 6681 - DNA, 20 bp, synthetic construct
  misc_feature 1..20: note = Description of Artificial Sequence: Synthetic oligonucleotide
  misc_feature 1..20: note = Target: ANGPTL3; (-) strand; PAM type: NRG; PAM sequence: CAG
  source 1..20: mol_type = other DNA
caagcgtgagccaccatgcc

SEQ ID NO: 6682 - DNA, 20 bp, synthetic construct
  misc_feature 1..20: note = Description of Artificial Sequence: Synthetic oligonucleotide
  misc_feature 1..20: note = Target: ANGPTL3; (-) strand; PAM type: NRG; PAM sequence: GAG
  source 1..20: mol_type = other DNA
agtgctgggattacaagcgt

SEQ ID NO: 6683 - DNA, 20 bp, synthetic construct
  misc_feature 1..20: note = Description of Artificial Sequence: Synthetic oligonucleotide
  misc_feature 1..20: note = Target: ANGPTL3; (-) strand; PAM type: NRG; PAM sequence: AAG
  source 1..20: mol_type = other DNA
tcccagagtgctgggattac

SEQ ID NO: 6684 - DNA, 20 bp, synthetic construct
  misc_feature 1..20: note = Description of Artificial Sequence: Synthetic oligonucleotide
  misc_feature 1..20: note = Target: ANGPTL3; (-) strand; PAM type: NRG; PAM sequence: GGG
  source 1..20: mol_type = other DNA
ccttggcctcccagagtgct

SEQ ID NO: 6685 - DNA, 20 bp, synthetic construct
  misc_feature 1..20: note = Description of Artificial Sequence: Synthetic oligonucleotide
  misc_feature 1..20: note = Target: ANGPTL3; (-) strand; PAM type: NRG; PAM sequence: TGG
  source 1..20: mol_type = other DNA
accttggcctcccagagtgc

SEQ ID NO: 6686 - DNA, 20 bp, synthetic construct
  misc_feature 1..20: note = Description of Artificial Sequence: Synthetic oligonucleotide
  misc_feature 1..20: note = Target: ANGPTL3; (-) strand; PAM type: NRG; PAM sequence: GAG
  source 1..20: mol_type = other DNA
ctgcctaccttggcctccca

SEQ ID NO: 6687 - DNA, 20 bp, synthetic construct
  misc_feature 1..20: note = Description of Artificial Sequence: Synthetic oligonucleotide
  misc_feature 1..20: note = Target: ANGPTL3; (-) strand; PAM type: NRG; PAM sequence: CAG
  source 1..20: mol_type = other DNA
atctgcctaccttggcctcc

SEQ ID NO: 6688 - DNA, 20 bp, synthetic construct
  misc_feature 1..20: note = Description of Artificial Sequence: Synthetic oligonucleotide
  misc_feature 1..20: note = Target: ANGPTL3; (-) strand; PAM type: NRG; PAM sequence: TGG
  source 1..20: mol_type = other DNA
ctcaggtgatctgcctacct

SEQ ID NO: 6689 - DNA, 20 bp, synthetic construct
  misc_feature 1..20: note = Description of Artificial Sequence: Synthetic oligonucleotide
  misc_feature 1..20: note = Target: ANGPTL3; (-) strand; PAM type: NRG; PAM sequence: AGG
  source 1..20: mol_type = other DNA
ggtctcgaactcctgacctc

SEQ ID NO: 6690 - DNA, 20 bp, synthetic construct
  misc_feature 1..20: note = Description of Artificial Sequence: Synthetic oligonucleotide
  misc_feature 1..20: note = Target: ANGPTL3; (-) strand; PAM type: NRG; PAM sequence: CAG
  source 1..20: mol_type = other DNA
tggtctcgaactcctgacct

SEQ ID NO: 6691 - DNA, 20 bp, synthetic construct
  misc_feature 1..20: note = Description of Artificial Sequence: Synthetic oligonucleotide
  misc_feature 1..20: note = Target: ANGPTL3; (-) strand; PAM type: NRG; PAM sequence: TGG
  source 1..20: mol_type = other DNA
tttcaccatgttggccagac

SEQ ID NO: 6692 - DNA, 20 bp, synthetic construct
  misc_feature 1..20: note = Description of Artificial Sequence: Synthetic oligonucleotide
  misc_feature 1..20: note = Target: ANGPTL3; (-) strand; PAM type: NRG; PAM sequence: CAG
  source 1..20: mol_type = other DNA
cggggtttcaccatgttggc

SEQ ID NO: 6693 - DNA, 20 bp, synthetic construct
  misc_feature 1..20: note = Description of Artificial Sequence: Synthetic oligonucleotide
  misc_feature 1..20: note = Target: ANGPTL3; (-) strand; PAM type: NRG; PAM sequence: TGG
  source 1..20: mol_type = other DNA
gagacggggtttcaccatgt

SEQ ID NO: 6694 - DNA, 20 bp, synthetic construct
  misc_feature 1..20: note = Description of Artificial Sequence: Synthetic oligonucleotide
  misc_feature 1..20: note = Target: ANGPTL3; (-) strand; PAM type: NRG; PAM sequence: GGG
  source 1..20: mol_type = other DNA
ttgtatttttagtagagacg

SEQ ID NO: 6695 - DNA, 20 bp, synthetic construct
  misc_feature 1..20: note = Description of Artificial Sequence: Synthetic oligonucleotide
  misc_feature 1..20: note = Target: ANGPTL3; (-) strand; PAM type: NRG; PAM sequence: GGG
  source 1..20: mol_type = other DNA
tttgtatttttagtagagac

SEQ ID NO: 6696 - DNA, 20 bp, synthetic construct
  misc_feature 1..20: note = Description of Artificial Sequence: Synthetic oligonucleotide
  misc_feature 1..20: note = Target: ANGPTL3; (-) strand; PAM type: NRG; PAM sequence: CGG
  source 1..20: mol_type = other DNA
ttttgtatttttagtagaga

SEQ ID NO: 6697 - DNA, 20 bp, synthetic construct
  misc_feature 1..20: note = Description of Artificial Sequence: Synthetic oligonucleotide
  misc_feature 1..20: note = Target: ANGPTL3; (-) strand; PAM type: NRG; PAM sequence: GAG
  source 1..20: mol_type = other DNA
taatttttgtatttttagta

SEQ ID NO: 6698 - DNA, 20 bp, synthetic construct
  misc_feature 1..20: note = Description of Artificial Sequence: Synthetic oligonucleotide
  misc_feature 1..20: note = Target: ANGPTL3; (-) strand; PAM type: NRG; PAM sequence: TAG
  source 1..20: mol_type = other DNA
gctaatttttgtatttttag

SEQ ID NO: 6699 - DNA, 20 bp, synthetic construct
  misc_feature 1..20: note = Description of Artificial Sequence: Synthetic oligonucleotide
  misc_feature 1..20: note = Target: ANGPTL3; (-) strand; PAM type: NRG; PAM sequence: TAG
  source 1..20: mol_type = other DNA
ctggctaatttttgtatttt

SEQ ID NO: 6700 - DNA, 20 bp, synthetic construct
  misc_feature 1..20: note = Description of Artificial Sequence: Synthetic oligonucleotide
  misc_feature 1..20: note = Target: ANGPTL3; (-) strand; PAM type: NRG; PAM sequence: TGG
  source 1..20: mol_type = other DNA
caggcacccccaaccaagcc

SEQ ID NO: 6701 - DNA, 20 bp, synthetic construct
  misc_feature 1..20: note = Description of Artificial Sequence: Synthetic oligonucleotide
  misc_feature 1..20: note = Target: ANGPTL3; (-) strand; PAM type: NRG; PAM sequence: AAG
  source 1..20: mol_type = other DNA
aattacaggcacccccaacc

SEQ ID NO: 6702 - DNA, 20 bp, synthetic construct
  misc_feature 1..20: note = Description of Artificial Sequence: Synthetic oligonucleotide
  misc_feature 1..20: note = Target: ANGPTL3; (-) strand; PAM type: NRG; PAM sequence: AGG
  source 1..20: mol_type = other DNA
tcccgagtatctggaattac

SEQ ID NO: 6703 - DNA, 20 bp, synthetic construct
  misc_feature 1..20: note = Description of Artificial Sequence: Synthetic oligonucleotide
  misc_feature 1..20: note = Target: ANGPTL3; (-) strand; PAM type: NRG; PAM sequence: CAG
  source 1..20: mol_type = other DNA
ttcccgagtatctggaatta

SEQ ID NO: 6704 - DNA, 20 bp, synthetic construct
  misc_feature 1..20: note = Description of Artificial Sequence: Synthetic oligonucleotide
  misc_feature 1..20: note = Target: ANGPTL3; (-) strand; PAM type: NRG; PAM sequence: TGG
  source 1..20: mol_type = other DNA
gtctcagcttcccgagtatc

SEQ ID NO: 6705 - DNA, 20 bp, synthetic construct
  misc_feature 1..20: note = Description of Artificial Sequence: Synthetic oligonucleotide
  misc_feature 1..20: note = Target: ANGPTL3; (-) strand; PAM type: NRG; PAM sequence: GAG
  source 1..20: mol_type = other DNA
ttctcctgtctcagcttccc

SEQ ID NO: 6706 - DNA, 20 bp, synthetic construct
  misc_feature 1..20: note = Description of Artificial Sequence: Synthetic oligonucleotide
  misc_feature 1..20: note = Target: ANGPTL3; (-) strand; PAM type: NRG; PAM sequence: CAG
  source 1..20: mol_type = other DNA
ttcaagcgattctcctgtct

SEQ ID NO: 6707 - DNA, 20 bp, synthetic construct
  misc_feature 1..20: note = Description of Artificial Sequence: Synthetic oligonucleotide
  misc_feature 1..20: note = Target: ANGPTL3; (-) strand; PAM type: NRG; PAM sequence: AAG
  source 1..20: mol_type = other DNA
aacttccccctcctgggttc

SEQ ID NO: 6708 - DNA, 20 bp, synthetic construct
  misc_feature 1..20: note = Description of Artificial Sequence: Synthetic oligonucleotide
  misc_feature 1..20: note = Target: ANGPTL3; (-) strand; PAM type: NRG; PAM sequence: GGG
  source 1..20: mol_type = other DNA
cactgcaacttccccctcct

SEQ ID NO: 6709 - DNA, 20 bp, synthetic construct
  misc_feature 1..20: note = Description of Artificial Sequence: Synthetic oligonucleotide
  misc_feature 1..20: note = Target: ANGPTL3; (-) strand; PAM type: NRG; PAM sequence: TGG
  source 1..20: mol_type = other DNA
tcactgcaacttccccctcc

SEQ ID NO: 6710 - DNA, 20 bp, synthetic construct
  misc_feature 1..20: note = Description of Artificial Sequence: Synthetic oligonucleotide
  misc_feature 1..20: note = Target: ANGPTL3; (-) strand; PAM type: NRG; PAM sequence: CAG
  source 1..20: mol_type = other DNA
ggagtgcagcgtcgtgatct

SEQ ID NO: 6711 - DNA, 20 bp, synthetic construct
  misc_feature 1..20: note = Description of Artificial Sequence: Synthetic oligonucleotide
  misc_feature 1..20: note = Target: ANGPTL3; (-) strand; PAM type: NRG; PAM sequence: CAG
  source 1..20: mol_type = other DNA
ttgttgcccaggctggagtg

SEQ ID NO: 6712 - DNA, 20 bp, synthetic construct
  misc_feature 1..20: note = Description of Artificial Sequence: Synthetic oligonucleotide
  misc_feature 1..20: note = Target: ANGPTL3; (-) strand; PAM type: NRG; PAM sequence: GAG
  source 1..20: mol_type = other DNA
gctctttgttgcccaggctg

SEQ ID NO: 6713 - DNA, 20 bp, synthetic construct
  misc_feature 1..20: note = Description of Artificial Sequence: Synthetic oligonucleotide
  misc_feature 1..20: note = Target: ANGPTL3; (-) strand; PAM type: NRG; PAM sequence: TGG
  source 1..20: mol_type = other DNA
ttgctctttgttgcccaggc

SEQ ID NO: 6714 - DNA, 20 bp, synthetic construct
  misc_feature 1..20: note = Description of Artificial Sequence: Synthetic oligonucleotide
  misc_feature 1..20: note = Target: ANGPTL3; (-) strand; PAM type: NRG; PAM sequence: AGG
  source 1..20: mol_type = other DNA
agttttgctctttgttgccc

SEQ ID NO: 6715 - DNA, 20 bp, synthetic construct
  misc_feature 1..20: note = Description of Artificial Sequence: Synthetic oligonucleotide
  misc_feature 1..20: note = Target: ANGPTL3; (-) strand; PAM type: NRG; PAM sequence: CAG
  source 1..20: mol_type = other DNA
gagttttgctctttgttgcc

SEQ ID NO: 6716 - DNA, 20 bp, synthetic construct
  misc_feature 1..20: note = Description of Artificial Sequence: Synthetic oligonucleotide
  misc_feature 1..20: note = Target: ANGPTL3; (-) strand; PAM type: NRG; PAM sequence: GAG
  source 1..20: mol_type = other DNA
ctttatttatttttgagacg

SEQ ID NO: 6717 - DNA, 20 bp, synthetic construct
  misc_feature 1..20: note = Description of Artificial Sequence: Synthetic oligonucleotide
  misc_feature 1..20: note = Target: ANGPTL3; (-) strand; PAM type: NRG; PAM sequence: CGG
  source 1..20: mol_type = other DNA
ttctttatttatttttgaga

SEQ ID NO: 6718 - DNA, 20 bp, synthetic construct
  misc_feature 1..20: note = Description of Artificial Sequence: Synthetic oligonucleotide
  misc_feature 1..20: note = Target: ANGPTL3; (-) strand; PAM type: NRG; PAM sequence: GAG
  source 1..20: mol_type = other DNA
ttttttctttatttattttt

SEQ ID NO: 6719 - DNA, 20 bp, synthetic construct
  misc_feature 1..20: note = Description of Artificial Sequence: Synthetic oligonucleotide
  misc_feature 1..20: note = Target: ANGPTL3; (-) strand; PAM type: NRG; PAM sequence: AAG
  source 1..20: mol_type = other DNA
gccgtatctttggacatgta

SEQ ID NO: 6720 - DNA, 20 bp, synthetic construct
  misc_feature 1..20: note = Description of Artificial Sequence: Synthetic oligonucleotide
  misc_feature 1..20: note = Target: ANGPTL3; (-) strand; PAM type: NRG; PAM sequence: TGG
  source 1..20: mol_type = other DNA
tagttgaacagccgtatctt

SEQ ID NO: 6721 - DNA, 20 bp, synthetic construct
  misc_feature 1..20: note = Description of Artificial Sequence: Synthetic oligonucleotide
  misc_feature 1..20: note = Target: ANGPTL3; (-) strand; PAM type: NRG; PAM sequence: CAG
  source 1..20: mol_type = other DNA
atatatattttttagttgaa

SEQ ID NO: 6722 - DNA, 20 bp, synthetic construct
  misc_feature 1..20: note = Description of Artificial Sequence: Synthetic oligonucleotide
  misc_feature 1..20: note = Target: ANGPTL3; (-) strand; PAM type: NRG; PAM sequence: TAG
  source 1..20: mol_type = other DNA
ttttatacatatatattttt

SEQ ID NO: 6723 - DNA, 20 bp, synthetic construct
  misc_feature 1..20: note = Description of Artificial Sequence: Synthetic oligonucleotide
  misc_feature 1..20: note = Target: ANGPTL3; (-) strand; PAM type: NRG; PAM sequence: AAG
  source 1..20: mol_type = other DNA
gtgttcactattaacatgtt

SEQ ID NO: 6724 - DNA, 20 bp, synthetic construct
  misc_feature 1..20: note = Description of Artificial Sequence: Synthetic oligonucleotide
  misc_feature 1..20: note = Target: ANGPTL3; (-) strand; PAM type: NRG; PAM sequence: AGG
  source 1..20: mol_type = other DNA
agaggttaagtgagctttga

SEQ ID NO: 6725 - DNA, 20 bp, synthetic construct
  misc_feature 1..20: note = Description of Artificial Sequence: Synthetic oligonucleotide
  misc_feature 1..20: note = Target: ANGPTL3; (-) strand; PAM type: NRG; PAM sequence: AAG
  source 1..20: mol_type = other DNA
cagaggttaagtgagctttg

SEQ ID NO: 6726 - DNA, 20 bp, synthetic construct
  misc_feature 1..20: note = Description of Artificial Sequence: Synthetic oligonucleotide
  misc_feature 1..20: note = Target: ANGPTL3; (-) strand; PAM type: NRG; PAM sequence: GAG
  source 1..20: mol_type = other DNA
tgtagatccagaggttaagt

SEQ ID NO: 6727 - DNA, 20 bp, synthetic construct
  misc_feature 1..20: note = Description of Artificial Sequence: Synthetic oligonucleotide
  misc_feature 1..20: note = Target: ANGPTL3; (-) strand; PAM type: NRG; PAM sequence: AAG
  source 1..20: mol_type = other DNA
acagtgtagatccagaggtt

SEQ ID NO: 6728 - DNA, 20 bp, synthetic construct
  misc_feature 1..20: note = Description of Artificial Sequence: Synthetic oligonucleotide
  misc_feature 1..20: note = Target: ANGPTL3; (-) strand; PAM type: NRG; PAM sequence: AGG
  source 1..20: mol_type = other DNA
tttggacagtgtagatccag

SEQ ID NO: 6729 - DNA, 20 bp, synthetic construct
  misc_feature 1..20: note = Description of Artificial Sequence: Synthetic oligonucleotide
  misc_feature 1..20: note = Target: ANGPTL3; (-) strand; PAM type: NRG; PAM sequence: GAG
  source 1..20: mol_type = other DNA
ttttggacagtgtagatcca

SEQ ID NO: 6730 - DNA, 20 bp, synthetic construct
  misc_feature 1..20: note = Description of Artificial Sequence: Synthetic oligonucleotide
  misc_feature 1..20: note = Target: ANGPTL3; (-) strand; PAM type: NRG; PAM sequence: CAG
  source 1..20: mol_type = other DNA
ctttttggacagtgtagatc

SEQ ID NO: 6731 - DNA, 20 bp, synthetic construct
  misc_feature 1..20: note = Description of Artificial Sequence: Synthetic oligonucleotide
  misc_feature 1..20: note = Target: ANGPTL3; (-) strand; PAM type: NRG; PAM sequence: TAG
  source 1..20: mol_type = other DNA
gaccgtctttttggacagtg

SEQ ID NO: 6732 - DNA, 20 bp, synthetic construct
  misc_feature 1..20: note = Description of Artificial Sequence: Synthetic oligonucleotide
  misc_feature 1..20: note = Target: ANGPTL3; (-) strand; PAM type: NRG; PAM sequence: CAG
  source 1..20: mol_type = other DNA
cattagaccgtctttttgga

SEQ ID NO: 6733 - DNA, 20 bp, synthetic construct
  misc_feature 1..20: note = Description of Artificial Sequence: Synthetic oligonucleotide
  misc_feature 1..20: note = Target: ANGPTL3; (-) strand; PAM type: NRG; PAM sequence: TGG
  source 1..20: mol_type = other DNA
gtctcattagaccgtctttt

SEQ ID NO: 6734 - DNA, 20 bp, synthetic construct
  misc_feature 1..20: note = Description of Artificial Sequence: Synthetic oligonucleotide
  misc_feature 1..20: note = Target: ANGPTL3; (-) strand; PAM type: NRG; PAM sequence: TAG
  source 1..20: mol_type = other DNA
caagtgctcaattgtctcat

SEQ ID NO: 6735 - DNA, 20 bp, synthetic construct
  misc_feature 1..20: note = Description of Artificial Sequence: Synthetic oligonucleotide
  misc_feature 1..20: note = Target: ANGPTL3; (-) strand; PAM type: NRG; PAM sequence: AAG
  source 1..20: mol_type = other DNA
gttagaaccactcacctatc

SEQ ID NO: 6736 - DNA, 20 bp, synthetic construct
  misc_feature 1..20: note = Description of Artificial Sequence: Synthetic oligonucleotide
  misc_feature 1..20: note = Target: ANGPTL3; (-) strand; PAM type: NRG; PAM sequence: TAG
  source 1..20: mol_type = other DNA
tactgagaacatatctcagt

SEQ ID NO: 6737 - DNA, 20 bp, synthetic construct
  misc_feature 1..20: note = Description of Artificial Sequence: Synthetic oligonucleotide
  misc_feature 1..20: note = Target: ANGPTL3; (-) strand; PAM type: NRG; PAM sequence: CAG
  source 1..20: mol_type = other DNA
tttatactgagaacatatct

SEQ ID NO: 6738 - DNA, 20 bp, synthetic construct
  misc_feature 1..20: note = Description of Artificial Sequence: Synthetic oligonucleotide
  misc_feature 1..20: note = Target: ANGPTL3; (-) strand; PAM type: NRG; PAM sequence: GAG
  source 1..20: mol_type = other DNA
cctattgtatgttttatact

SEQ ID NO: 6739 - DNA, 20 bp, synthetic construct
  misc_feature 1..20: note = Description of Artificial Sequence: Synthetic oligonucleotide
  misc_feature 1..20: note = Target: ANGPTL3; (-) strand; PAM type: NRG; PAM sequence: AAG
  source 1..20: mol_type = other DNA
tttaattaatgttgtatagg

SEQ ID NO: 6740 - DNA, 20 bp, synthetic construct
  misc_feature 1..20: note = Description of Artificial Sequence: Synthetic oligonucleotide
  misc_feature 1..20: note = Target: ANGPTL3; (-) strand; PAM type: NRG; PAM sequence: AGG
  source 1..20: mol_type = other DNA
ttttttaattaatgttgtat

SEQ ID NO: 6741 - DNA, 20 bp, synthetic construct
  misc_feature 1..20: note = Description of Artificial Sequence: Synthetic oligonucleotide
  misc_feature 1..20: note = Target: ANGPTL3; (-) strand; PAM type: NRG; PAM sequence: TAG
  source 1..20: mol_type = other DNA
gttttttaattaatgttgta

SEQ ID NO: 6742 - DNA, 20 bp, synthetic construct
  misc_feature 1..20: note = Description of Artificial Sequence: Synthetic oligonucleotide
  misc_feature 1..20: note = Target: ANGPTL3; (-) strand; PAM type: NRG; PAM sequence: TAG
  source 1..20: mol_type = other DNA
tttttcctttttaactacaa

SEQ ID NO: 6743 - DNA, 20 bp, synthetic construct
  misc_feature 1..20: note = Description of Artificial Sequence: Synthetic oligonucleotide
  misc_feature 1..20: note = Target: ANGPTL3; (-) strand; PAM type: NRG; PAM sequence: TAG
  source 1..20: mol_type = other DNA
tattttggctcttttttaca

SEQ ID NO: 6744 - DNA, 20 bp, synthetic construct
  misc_feature 1..20: note = Description of Artificial Sequence: Synthetic oligonucleotide
  misc_feature 1..20: note = Target: ANGPTL3; (-) strand; PAM type: NRG; PAM sequence: TGG
  source 1..20: mol_type = other DNA
aaataaaatacaaggtattt

SEQ ID NO: 6745 - DNA, 20 bp, synthetic construct
  misc_feature 1..20: note = Description of Artificial Sequence: Synthetic oligonucleotide
  misc_feature 1..20: note = Target: ANGPTL3; (-) strand; PAM type: NRG; PAM sequence: AGG
  source 1..20: mol_type = other DNA
tgtctttcaaataaaataca

SEQ ID NO: 6746 - DNA, 20 bp, synthetic construct
  misc_feature 1..20: note = Description of Artificial Sequence: Synthetic oligonucleotide
  misc_feature 1..20: note = Target: ANGPTL3; (-) strand; PAM type: NRG; PAM sequence: AAG
  source 1..20: mol_type = other DNA
atgtctttcaaataaaatac

SEQ ID NO: 6747 - DNA, 20 bp, synthetic construct
  misc_feature 1..20: note = Description of Artificial Sequence: Synthetic oligonucleotide
  misc_feature 1..20: note = Target: ANGPTL3; (-) strand; PAM type: NRG; PAM sequence: GAG
  source 1..20: mol_type = other DNA
cgaggttgtgtaatcttatg

SEQ ID NO: 6748 - DNA, 20 bp, synthetic construct
  misc_feature 1..20: note = Description of Artificial Sequence: Synthetic oligonucleotide
  misc_feature 1..20: note = Target: ANGPTL3; (-) strand; PAM type: NRG; PAM sequence: TGG
  source 1..20: mol_type = other DNA
cacgaggttgtgtaatctta

SEQ ID NO: 6749 - DNA, 20 bp, synthetic construct
  misc_feature 1..20: note = Description of Artificial Sequence: Synthetic oligonucleotide
  misc_feature 1..20: note = Target: ANGPTL3; (-) strand; PAM type: NRG; PAM sequence: AGG
  source 1..20: mol_type = other DNA
aaagtcctttatcctacacg

SEQ ID NO: 6750 - DNA, 20 bp, synthetic construct
  misc_feature 1..20: note = Description of Artificial Sequence: Synthetic oligonucleotide
  misc_feature 1..20: note = Target: ANGPTL3; (-) strand; PAM type: NRG; PAM sequence: GAG
  source 1..20: mol_type = other DNA
caaagtcctttatcctacac

SEQ ID NO: 6751 - DNA, 20 bp, synthetic construct
  misc_feature 1..20: note = Description of Artificial Sequence: Synthetic oligonucleotide
  misc_feature 1..20: note = Target: ANGPTL3; (-) strand; PAM type: NRG; PAM sequence: AAG
  source 1..20: mol_type = other DNA
tttaaattccaagcaaagca

SEQ ID NO: 6752 - DNA, 20 bp, synthetic construct
  misc_feature 1..20: note = Description of Artificial Sequence: Synthetic oligonucleotide
  misc_feature 1..20: note = Target: ANGPTL3; (-) strand; PAM type: NRG; PAM sequence: AAG
  source 1..20: mol_type = other DNA
aattgtttaaattccaagca

SEQ ID NO: 6753 - DNA, 20 bp, synthetic construct
  misc_feature 1..20: note = Description of Artificial Sequence: Synthetic oligonucleotide
  misc_feature 1..20: note = Target: ANGPTL3; (-) strand; PAM type: NRG; PAM sequence: AAG
  source 1..20: mol_type = other DNA
gcctaaattgtttaaattcc

SEQ ID NO: 6754 - DNA, 20 bp, synthetic construct
  misc_feature 1..20: note = Description of Artificial Sequence: Synthetic oligonucleotide
  misc_feature 1..20: note = Target: ANGPTL3; (-) strand; PAM type: NRG; PAM sequence: GAG
  source 1..20: mol_type = other DNA
gagaattttaggacatttaa

SEQ ID NO: 6755 - DNA, 20 bp, synthetic construct
  misc_feature 1..20: note = Description of Artificial Sequence: Synthetic oligonucleotide
  misc_feature 1..20: note = Target: ANGPTL3; (-) strand; PAM type: NRG; PAM sequence: AAG
  source 1..20: mol_type = other DNA
cagagaattttaggacattt

SEQ ID NO: 6756 - DNA, 20 bp, synthetic construct
  misc_feature 1..20: note = Description of Artificial Sequence: Synthetic oligonucleotide
  misc_feature 1..20: note = Target: ANGPTL3; (-) strand; PAM type: NRG; PAM sequence: AGG
  source 1..20: mol_type = other DNA
tcttagctacagagaatttt

SEQ ID NO: 6757 - DNA, 20 bp, synthetic construct
  misc_feature 1..20: note = Description of Artificial Sequence: Synthetic oligonucleotide
  misc_feature 1..20: note = Target: ANGPTL3; (-) strand; PAM type: NRG; PAM sequence: TAG
  source 1..20: mol_type = other DNA
ttcttagctacagagaattt

SEQ ID NO: 6758 - DNA, 20 bp, synthetic construct
  misc_feature 1..20: note = Description of Artificial Sequence: Synthetic oligonucleotide
  misc_feature 1..20: note = Target: ANGPTL3; (-) strand; PAM type: NRG; PAM sequence: GAG
  source 1..20: mol_type = other DNA
ataaaaatttcttagctaca

SEQ ID NO: 6759 - DNA, 20 bp, synthetic construct
  misc_feature 1..20: note = Description of Artificial Sequence: Synthetic oligonucleotide
  misc_feature 1..20: note = Target: ANGPTL3; (-) strand; PAM type: NRG; PAM sequence: CAG
  source 1..20: mol_type = other DNA
atataaaaatttcttagcta

SEQ ID NO: 6760 - DNA, 20 bp, synthetic construct
  misc_feature 1..20: note = Description of Artificial Sequence: Synthetic oligonucleotide
  misc_feature 1..20: note = Target: ANGPTL3; (-) strand; PAM type: NRG; PAM sequence: TAG
  source 1..20: mol_type = other DNA
gaaccaatataaaaatttct

SEQ ID NO: 6761 - DNA, 20 bp, synthetic construct
  misc_feature 1..20: note = Description of Artificial Sequence: Synthetic oligonucleotide
  misc_feature 1..20: note = Target: ANGPTL3; (-) strand; PAM type: NRG; PAM sequence: AGG
  source 1..20: mol_type = other DNA
tttaaggattcctagttcct

SEQ ID NO: 6762 - DNA, 20 bp, synthetic construct
  misc_feature 1..20: note = Description of Artificial Sequence: Synthetic oligonucleotide
  misc_feature 1..20: note = Target: ANGPTL3; (-) strand; PAM type: NRG; PAM sequence: TAG
  source 1..20: mol_type = other DNA
atttaaggattcctagttcc

SEQ ID NO: 6763 - DNA, 20 bp, synthetic construct
  misc_feature 1..20: note = Description of Artificial Sequence: Synthetic oligonucleotide
  misc_feature 1..20: note = Target: ANGPTL3; (-) strand; PAM type: NRG; PAM sequence: TAG
  source 1..20: mol_type = other DNA
gggcctaatttaaggattcc

SEQ ID NO: 6764 - DNA, 20 bp, synthetic construct
  misc_feature 1..20: note = Description of Artificial Sequence: Synthetic oligonucleotide
  misc_feature 1..20: note = Target: ANGPTL3; (-) strand; PAM type: NRG; PAM sequence: AGG
  source 1..20: mol_type = other DNA
caaatgtagggcctaattta

SEQ ID NO: 6765 - DNA, 20 bp, synthetic construct
  misc_feature 1..20: note = Description of Artificial Sequence: Synthetic oligonucleotide
  misc_feature 1..20: note = Target: ANGPTL3; (-) strand; PAM type: NRG; PAM sequence: AAG
  source 1..20: mol_type = other DNA
gcaaatgtagggcctaattt

SEQ ID NO: 6766 - DNA, 20 bp, synthetic construct
  misc_feature 1..20: note = Description of Artificial Sequence: Synthetic oligonucleotide
  misc_feature 1..20: note = Target: ANGPTL3; (-) strand; PAM type: NRG; PAM sequence: GGG
  source 1..20: mol_type = other DNA
taaacttgtaagcaaatgta

SEQ ID NO: 6767 - DNA, 20 bp, synthetic construct
  misc_feature 1..20: note = Description of Artificial Sequence: Synthetic oligonucleotide
  misc_feature 1..20: note = Target: ANGPTL3; (-) strand; PAM type: NRG; PAM sequence: AGG
  source 1..20: mol_type = other DNA
ataaacttgtaagcaaatgt

SEQ ID NO: 6768 - DNA, 20 bp, synthetic construct
  misc_feature 1..20: note = Description of Artificial Sequence: Synthetic oligonucleotide
  misc_feature 1..20: note = Target: ANGPTL3; (-) strand; PAM type: NRG; PAM sequence: TAG
  source 1..20: mol_type = other DNA
aataaacttgtaagcaaatg

SEQ ID NO: 6769 - DNA, 20 bp, synthetic construct
  misc_feature 1..20: note = Description of Artificial Sequence: Synthetic oligonucleotide
  misc_feature 1..20: note = Target: ANGPTL3; (-) strand; PAM type: NRG; PAM sequence: AAG
  source 1..20: mol_type = other DNA
gccaaggaaaataaacttgt

SEQ ID NO: 6770 - DNA, 20 bp, synthetic construct
  misc_feature 1..20: note = Description of Artificial Sequence: Synthetic oligonucleotide
  misc_feature 1..20: note = Target: ANGPTL3; (-) strand; PAM type: NRG; PAM sequence: AGG
  source 1..20: mol_type = other DNA
aactaaaaaattttatgcca

SEQ ID NO: 6771 - DNA, 20 bp, synthetic construct
  misc_feature 1..20: note = Description of Artificial Sequence: Synthetic oligonucleotide
  misc_feature 1..20: note = Target: ANGPTL3; (-) strand; PAM type: NRG; PAM sequence: AAG
  source 1..20: mol_type = other DNA
aaactaaaaaattttatgcc

SEQ ID NO: 6772 - DNA, 20 bp, synthetic construct
  misc_feature 1..20: note = Description of Artificial Sequence: Synthetic oligonucleotide
  misc_feature 1..20: note = Target: ANGPTL3; (-) strand; PAM type: NRG; PAM sequence: CAG
  source 1..20: mol_type = other DNA
gaaccctgatcaaatataac

SEQ ID NO: 6773 - DNA, 20 bp, synthetic construct
  misc_feature 1..20: note = Description of Artificial Sequence: Synthetic oligonucleotide
  misc_feature 1..20: note = Target: ANGPTL3; (-) strand; PAM type: NRG; PAM sequence: TAG
  source 1..20: mol_type = other DNA
tgaacttgtgcctatttaaa

SEQ ID NO: 6774 - DNA, 20 bp, synthetic construct
  misc_feature 1..20: note = Description of Artificial Sequence: Synthetic oligonucleotide
  misc_feature 1..20: note = Target: ANGPTL3; (-) strand; PAM type: NRG; PAM sequence: CAG
  source 1..20: mol_type = other DNA
tgagtacacactgctaaaag

SEQ ID NO: 6775 - DNA, 20 bp, synthetic construct
  misc_feature 1..20: note = Description of Artificial Sequence: Synthetic oligonucleotide
  misc_feature 1..20: note = Target: ANGPTL3; (-) strand; PAM type: NRG; PAM sequence: AAG
  source 1..20: mol_type = other DNA
gtctgagtacacactgctaa

SEQ ID NO: 6776 - DNA, 20 bp, synthetic construct
  misc_feature 1..20: note = Description of Artificial Sequence: Synthetic oligonucleotide
  misc_feature 1..20: note = Target: ANGPTL3; (-) strand; PAM type: NRG; PAM sequence: GAG
  source 1..20: mol_type = other DNA
ccttttaatacttcctgtct

SEQ ID NO: 6777 - DNA, 20 bp, synthetic construct
  misc_feature 1..20: note = Description of Artificial Sequence: Synthetic oligonucleotide
  misc_feature 1..20: note = Target: ANGPTL3; (-) strand; PAM type: NRG; PAM sequence: AGG
  source 1..20: mol_type = other DNA
tgaaagtagtaattttataa

SEQ ID NO: 6778 - DNA, 20 bp, synthetic construct
  misc_feature 1..20: note = Description of Artificial Sequence: Synthetic oligonucleotide
  misc_feature 1..20: note = Target: ANGPTL3; (-) strand; PAM type: NRG; PAM sequence: AAG
  source 1..20: mol_type = other DNA
ttgaaagtagtaattttata

SEQ ID NO: 6779 - DNA, 20 bp, synthetic construct
  misc_feature 1..20: note = Description of Artificial Sequence: Synthetic oligonucleotide
  misc_feature 1..20: note = Target: ANGPTL3; (-) strand; PAM type: NRG; PAM sequence: TAG
  source 1..20: mol_type = other DNA
gtgggaaaatgcattgaaag

SEQ ID NO: 6780 - DNA, 20 bp, synthetic construct
  misc_feature 1..20: note = Description of Artificial Sequence: Synthetic oligonucleotide
  misc_feature 1..20: note = Target: ANGPTL3; (-) strand; PAM type: NRG; PAM sequence: AAG
  source 1..20: mol_type = other DNA
aacgtgggaaaatgcattga

SEQ ID NO: 6781 - DNA, 20 bp, synthetic construct
  misc_feature 1..20: note = Description of Artificial Sequence: Synthetic oligonucleotide
  misc_feature 1..20: note = Target: ANGPTL3; (-) strand; PAM type: NRG; PAM sequence: GGG
  source 1..20: mol_type = other DNA
ctgcagaagcatttcaacgt

SEQ ID NO: 6782 - DNA, 20 bp, synthetic construct
  misc_feature 1..20: note = Description of Artificial Sequence: Synthetic oligonucleotide
  misc_feature 1..20: note = Target: ANGPTL3; (-) strand; PAM type: NRG; PAM sequence: TGG
  source 1..20: mol_type = other DNA
actgcagaagcatttcaacg

SEQ ID NO: 6783 - DNA, 20 bp, synthetic construct
  misc_feature 1..20: note = Description of Artificial Sequence: Synthetic oligonucleotide
  misc_feature 1..20: note = Target: ANGPTL3; (-) strand; PAM type: NRG; PAM sequence: AAG
  source 1..20: mol_type = other DNA
tgcctaattataaactgcag

SEQ ID NO: 6784 - DNA, 20 bp, synthetic construct
  misc_feature 1..20: note = Description of Artificial Sequence: Synthetic oligonucleotide
  misc_feature 1..20: note = Target: ANGPTL3; (-) strand; PAM type: NRG; PAM sequence: CAG
  source 1..20: mol_type = other DNA
atttgcctaattataaactg

SEQ ID NO: 6785 - DNA, 20 bp, synthetic construct
  misc_feature 1..20: note = Description of Artificial Sequence: Synthetic oligonucleotide
  misc_feature 1..20: note = Target: ANGPTL3; (-) strand; PAM type: NRG; PAM sequence: AAG
  source 1..20: mol_type = other DNA
agcattattgattataatta

SEQ ID NO: 6786 - DNA, 20 bp, synthetic construct
  misc_feature 1..20: note = Description of Artificial Sequence: Synthetic oligonucleotide
  misc_feature 1..20: note = Target: ANGPTL3; (-) strand; PAM type: NRG; PAM sequence: CAG
  source 1..20: mol_type = other DNA
aattcttatagtaatttgaa

SEQ ID NO: 6787 - DNA, 20 bp, synthetic construct
  misc_feature 1..20: note = Description of Artificial Sequence: Synthetic oligonucleotide
  misc_feature 1..20: note = Target: ANGPTL3; (-) strand; PAM type: NRG; PAM sequence: TAG
  source 1..20: mol_type = other DNA
aaatatctgtataattctta

SEQ ID NO: 6788 - DNA, 20 bp, synthetic construct
  misc_feature 1..20: note = Description of Artificial Sequence: Synthetic oligonucleotide
  misc_feature 1..20: note = Target: ANGPTL3; (-) strand; PAM type: NRG; PAM sequence: TGG
  source 1..20: mol_type = other DNA
gtttctagtatattgtctct

SEQ ID NO: 6789 - DNA, 20 bp, synthetic construct
  misc_feature 1..20: note = Description of Artificial Sequence: Synthetic oligonucleotide
  misc_feature 1..20: note = Target: ANGPTL3; (-) strand; PAM type: NRG; PAM sequence: TAG
  source 1..20: mol_type = other DNA
ggtcacgtagtcttggtttc

SEQ ID NO: 6790 - DNA, 20 bp, synthetic construct
  misc_feature 1..20: note = Description of Artificial Sequence: Synthetic oligonucleotide
  misc_feature 1..20: note = Target: ANGPTL3; (-) strand; PAM type: NRG; PAM sequence: TGG
  source 1..20: mol_type = other DNA
aggtaatggtcacgtagtct

SEQ ID NO: 6791 - DNA, 20 bp, synthetic construct
  misc_feature 1..20: note = Description of Artificial Sequence: Synthetic oligonucleotide
  misc_feature 1..20: note = Target: ANGPTL3; (-) strand; PAM type: NRG; PAM sequence: TAG
  source 1..20: mol_type = other DNA
gagtagaggtaatggtcacg

SEQ ID NO: 6792 - DNA, 20 bp, synthetic construct
  misc_feature 1..20: note = Description of Artificial Sequence: Synthetic oligonucleotide
  misc_feature 1..20: note = Target: ANGPTL3; (-) strand; PAM type: NRG; PAM sequence: TGG
  source 1..20: mol_type = other DNA
cactgacagagtagaggtaa

SEQ ID NO: 6793 - DNA, 20 bp, synthetic construct
  misc_feature 1..20: note = Description of Artificial Sequence: Synthetic oligonucleotide
  misc_feature 1..20: note = Target: ANGPTL3; (-) strand; PAM type: NRG; PAM sequence: AGG
  source 1..20: mol_type = other DNA
aaataacactgacagagtag

SEQ ID NO: 6794 - DNA, 20 bp, synthetic construct
  misc_feature 1..20: note = Description of Artificial Sequence: Synthetic oligonucleotide
  misc_feature 1..20: note = Target: ANGPTL3; (-) strand; PAM type: NRG; PAM sequence: GAG
  source 1..20: mol_type = other DNA
caaataacactgacagagta

SEQ ID NO: 6795 - DNA, 20 bp, synthetic construct
  misc_feature 1..20: note = Description of Artificial Sequence: Synthetic oligonucleotide
  misc_feature 1..20: note = Target: ANGPTL3; (-) strand; PAM type: NRG; PAM sequence: TAG
  source 1..20: mol_type = other DNA
cacaaataacactgacagag

SEQ ID NO: 6796 - DNA, 20 bp, synthetic construct
  misc_feature 1..20: note = Description of Artificial Sequence: Synthetic oligonucleotide
  misc_feature 1..20: note = Target: ANGPTL3; (-) strand; PAM type: NRG; PAM sequence: GAG
  source 1..20: mol_type = other DNA
tctcacaaataacactgaca

SEQ ID NO: 6797 - DNA, 20 bp, synthetic construct
  misc_feature 1..20: note = Description of Artificial Sequence: Synthetic oligonucleotide
  misc_feature 1..20: note = Target: ANGPTL3; (-) strand; PAM type: NRG; PAM sequence: CAG
  source 1..20: mol_type = other DNA
tttctcacaaataacactga

SEQ ID NO: 6798 - DNA, 20 bp, synthetic construct
  misc_feature 1..20: note = Description of Artificial Sequence: Synthetic oligonucleotide
  misc_feature 1..20: note = Target: ANGPTL3; (-) strand; PAM type: NRG; PAM sequence: AGG
  source 1..20: mol_type = other DNA
atattatatcctactgtagt

SEQ ID NO: 6799 - DNA, 20 bp, synthetic construct
  misc_feature 1..20: note = Description of Artificial Sequence: Synthetic oligonucleotide
  misc_feature 1..20: note = Target: ANGPTL3; (-) strand; PAM type: NRG; PAM sequence: TAG
  source 1..20: mol_type = other DNA
tatattatatcctactgtag

SEQ ID NO: 6800 - DNA, 20 bp, synthetic construct
  misc_feature 1..20: note = Description of Artificial Sequence: Synthetic oligonucleotide
  misc_feature 1..20: note = Target: ANGPTL3; (-) strand; PAM type: NRG; PAM sequence: TAG
  source 1..20: mol_type = other DNA
ttctatattatatcctactg

SEQ ID NO: 6801 - DNA, 20 bp, synthetic construct
  misc_feature 1..20: note = Description of Artificial Sequence: Synthetic oligonucleotide
  misc_feature 1..20: note = Target: ANGPTL3; (-) strand; PAM type: NRG; PAM sequence: AGG
  source 1..20: mol_type = other DNA
tgagcactagtaccaaagac

SEQ ID NO: 6802 - DNA, 20 bp, synthetic construct
  misc_feature 1..20: note = Description of Artificial Sequence: Synthetic oligonucleotide
  misc_feature 1..20: note = Target: ANGPTL3; (-) strand; PAM type: NRG; PAM sequence: CAG
  source 1..20: mol_type = other DNA
ctgagcactagtaccaaaga

SEQ ID NO: 6803 - DNA, 20 bp, synthetic construct
  misc_feature 1..20: note = Description of Artificial Sequence: Synthetic oligonucleotide
  misc_feature 1..20: note = Target: ANGPTL3; (-) strand; PAM type: NRG; PAM sequence: AAG
  source 1..20: mol_type = other DNA
gtaactgagcactagtacca

SEQ ID NO: 6804 - DNA, 20 bp, synthetic construct
  misc_feature 1..20: note = Description of Artificial Sequence: Synthetic oligonucleotide
  misc_feature 1..20: note = Target: ANGPTL3; (-) strand; PAM type: NRG; PAM sequence: TAG
  source 1..20: mol_type = other DNA
taatgaaagtaactgagcac

SEQ ID NO: 6805 - DNA, 20 bp, synthetic construct
  misc_feature 1..20: note = Description of Artificial Sequence: Synthetic oligonucleotide
  misc_feature 1..20: note = Target: ANGPTL3; (-) strand; PAM type: NRG; PAM sequence: GAG
  source 1..20: mol_type = other DNA
tttagttaatgaaagtaact

SEQ ID NO: 6806 - DNA, 20 bp, synthetic construct
  misc_feature 1..20: note = Description of Artificial Sequence: Synthetic oligonucleotide
  misc_feature 1..20: note = Target: ANGPTL3; (-) strand; PAM type: NRG; PAM sequence: AAG
  source 1..20: mol_type = other DNA
gccccttttttagttaatga

SEQ ID NO: 6807 - DNA, 20 bp, synthetic construct
  misc_feature 1..20: note = Description of Artificial Sequence: Synthetic oligonucleotide
  misc_feature 1..20: note = Target: ANGPTL3; (-) strand; PAM type: NRG; PAM sequence: TAG
  source 1..20: mol_type = other DNA
ttgaagagtagccccttttt

SEQ ID NO: 6808 - DNA, 20 bp, synthetic construct
  misc_feature 1..20: note = Description of Artificial Sequence: Synthetic oligonucleotide
  misc_feature 1..20: note = Target: ANGPTL3; (-) strand; PAM type: NRG; PAM sequence: TAG
  source 1..20: mol_type = other DNA
agagaagggaatttgaagag

SEQ ID NO: 6809 - DNA, 20 bp, synthetic construct
  misc_feature 1..20: note = Description of Artificial Sequence: Synthetic oligonucleotide
  misc_feature 1..20: note = Target: ANGPTL3; (-) strand; PAM type: NRG; PAM sequence: GAG
  source 1..20: mol_type = other DNA
tttagagaagggaatttgaa

SEQ ID NO: 6810 - DNA, 20 bp, synthetic construct
  misc_feature 1..20: note = Description of Artificial Sequence: Synthetic oligonucleotide
  misc_feature 1..20: note = Target: ANGPTL3; (-) strand; PAM type: NRG; PAM sequence: AAG
  source 1..20: mol_type = other DNA
tttttagagaagggaatttg

SEQ ID NO: 6811 - DNA, 20 bp, synthetic construct
  misc_feature 1..20: note = Description of Artificial Sequence: Synthetic oligonucleotide
  misc_feature 1..20: note = Target: ANGPTL3; (-) strand; PAM type: NRG; PAM sequence: GGG
  source 1..20: mol_type = other DNA
agtacattctttttagagaa

SEQ ID NO: 6812 - DNA, 20 bp, synthetic construct
  misc_feature 1..20: note = Description of Artificial Sequence: Synthetic oligonucleotide
  misc_feature 1..20: note = Target: ANGPTL3; (-) strand; PAM type: NRG; PAM sequence: AGG
  source 1..20: mol_type = other DNA
tagtacattctttttagaga

SEQ ID NO: 6813 - DNA, 20 bp, synthetic construct
  misc_feature 1..20: note = Description of Artificial Sequence: Synthetic oligonucleotide
  misc_feature 1..20: note = Target: ANGPTL3; (-) strand; PAM type: NRG; PAM sequence: AAG
  source 1..20: mol_type = other DNA
atagtacattctttttagag

SEQ ID NO: 6814 - DNA, 20 bp, synthetic construct
  misc_feature 1..20: note = Description of Artificial Sequence: Synthetic oligonucleotide
  misc_feature 1..20: note = Target: ANGPTL3; (-) strand; PAM type: NRG; PAM sequence: GAG
  source 1..20: mol_type = other DNA
gatatagtacattcttttta

SEQ ID NO: 6815 - DNA, 20 bp, synthetic construct
  misc_feature 1..20: note = Description of Artificial Sequence: Synthetic oligonucleotide
  misc_feature 1..20: note = Target: ANGPTL3; (-) strand; PAM type: NRG; PAM sequence: TAG
  source 1..20: mol_type = other DNA
ttgatatagtacattctttt

SEQ ID NO: 6816 - DNA, 20 bp, synthetic construct
  misc_feature 1..20: note = Description of Artificial Sequence: Synthetic oligonucleotide
  misc_feature 1..20: note = Target: ANGPTL3; (-) strand; PAM type: NRG; PAM sequence: TAG
  source 1..20: mol_type = other DNA
gtgtttacccccttttgata

SEQ ID NO: 6817 - DNA, 20 bp, synthetic construct
  misc_feature 1..20: note = Description of Artificial Sequence: Synthetic oligonucleotide
  misc_feature 1..20: note = Target: ANGPTL3; (-) strand; PAM type: NRG; PAM sequence: TAG
  source 1..20: mol_type = other DNA
agtgcagaatgtatacgtag

SEQ ID NO: 6818 - DNA, 20 bp, synthetic construct
  misc_feature 1..20: note = Description of Artificial Sequence: Synthetic oligonucleotide
  misc_feature 1..20: note = Target: ANGPTL3; (-) strand; PAM type: NRG; PAM sequence: TAG
  source 1..20: mol_type = other DNA
ctaagtgcagaatgtatacg

SEQ ID NO: 6819 - DNA, 20 bp, synthetic construct
  misc_feature 1..20: note = Description of Artificial Sequence: Synthetic oligonucleotide
  misc_feature 1..20: note = Target: ANGPTL3; (-) strand; PAM type: NRG; PAM sequence: CAG
  source 1..20: mol_type = other DNA
catatagggatttctaagtg

SEQ ID NO: 6820 - DNA, 20 bp, synthetic construct
  misc_feature 1..20: note = Description of Artificial Sequence: Synthetic oligonucleotide
  misc_feature 1..20: note = Target: ANGPTL3; (-) strand; PAM type: NRG; PAM sequence: AAG
  source 1..20: mol_type = other DNA
atcaacatatagggatttct

SEQ ID NO: 6821 - DNA, 20 bp, synthetic construct
  misc_feature 1..20: note = Description of Artificial Sequence: Synthetic oligonucleotide
  misc_feature 1..20: note = Target: ANGPTL3; (-) strand; PAM type: NRG; PAM sequence: GGG
  source 1..20: mol_type = other DNA
aatgataaaatcaacatata

SEQ ID NO: 6822 - DNA, 20 bp, synthetic construct
  misc_feature 1..20: note = Description of Artificial Sequence: Synthetic oligonucleotide
  misc_feature 1..20: note = Target: ANGPTL3; (-) strand; PAM type: NRG; PAM sequence: AGG
  source 1..20: mol_type = other DNA
gaatgataaaatcaacatat

SEQ ID NO: 6823 - DNA, 20 bp, synthetic construct
  misc_feature 1..20: note = Description of Artificial Sequence: Synthetic oligonucleotide
  misc_feature 1..20: note = Target: ANGPTL3; (-) strand; PAM type: NRG; PAM sequence: TAG
  source 1..20: mol_type = other DNA
agaatgataaaatcaacata

SEQ ID NO: 6824 - DNA, 20 bp, synthetic construct
  misc_feature 1..20: note = Description of Artificial Sequence: Synthetic oligonucleotide
  misc_feature 1..20: note = Target: ANGPTL3; (-) strand; PAM type: NRG; PAM sequence: GAG
  source 1..20: mol_type = other DNA
aaacaatatttattgaataa

SEQ ID NO: 6825 - DNA, 20 bp, synthetic construct
  misc_feature 1..20: note = Description of Artificial Sequence: Synthetic oligonucleotide
  misc_feature 1..20: note = Target: ANGPTL3; (-) strand; PAM type: NRG; PAM sequence: AAG
  source 1..20: mol_type = other DNA
agaaacaatatttattgaat

SEQ ID NO: 6826 - DNA, 20 bp, synthetic construct
  misc_feature 1..20: note = Description of Artificial Sequence: Synthetic oligonucleotide
  misc_feature 1..20: note = Target: ANGPTL3; (-) strand; PAM type: NRG; PAM sequence: TAG
  source 1..20: mol_type = other DNA
cagtaatgccttacacattg

SEQ ID NO: 6827 - DNA, 20 bp, synthetic construct
  misc_feature 1..20: note = Description of Artificial Sequence: Synthetic oligonucleotide
  misc_feature 1..20: note = Target: ANGPTL3; (-) strand; PAM type: NRG; PAM sequence: CAG
  source 1..20: mol_type = other DNA
ttccttataatgctttagta

SEQ ID NO: 6828 - DNA, 20 bp, synthetic construct
  misc_feature 1..20: note = Description of Artificial Sequence: Synthetic oligonucleotide
  misc_feature 1..20: note = Target: ANGPTL3; (-) strand; PAM type: NRG; PAM sequence: TAG
  source 1..20: mol_type = other DNA
ttatattccttataatgctt

SEQ ID NO: 6829 - DNA, 20 bp, synthetic construct
  misc_feature 1..20: note = Description of Artificial Sequence: Synthetic oligonucleotide
  misc_feature 1..20: note = Target: ANGPTL3; (-) strand; PAM type: NRG; PAM sequence: AAG
  source 1..20: mol_type = other DNA
actataagctgttgattggc

SEQ ID NO: 6830 - DNA, 20 bp, synthetic construct
  misc_feature 1..20: note = Description of Artificial Sequence: Synthetic oligonucleotide
  misc_feature 1..20: note = Target: ANGPTL3; (-) strand; PAM type: NRG; PAM sequence: TGG
  source 1..20: mol_type = other DNA
ttacactataagctgttgat

SEQ ID NO: 6831 - DNA, 20 bp, synthetic construct
  misc_feature 1..20: note = Description of Artificial Sequence: Synthetic oligonucleotide
  misc_feature 1..20: note = Target: ANGPTL3; (-) strand; PAM type: NRG; PAM sequence: AAG
  source 1..20: mol_type = other DNA
tctctcccctattacactat

SEQ ID NO: 6832 - DNA, 20 bp, synthetic construct
  misc_feature 1..20: note = Description of Artificial Sequence: Synthetic oligonucleotide
  misc_feature 1..20: note = Target: ANGPTL3; (-) strand; PAM type: NRG; PAM sequence: CAG
  source 1..20: mol_type = other DNA
gagggagaatatagatgggc

SEQ ID NO: 6833 - DNA, 20 bp, synthetic construct
  misc_feature 1..20: note = Description of Artificial Sequence: Synthetic oligonucleotide
  misc_feature 1..20: note = Target: ANGPTL3; (-) strand; PAM type: NRG; PAM sequence: GGG
  source 1..20: mol_type = other DNA
agttgagggagaatatagat

SEQ ID NO: 6834 - DNA, 20 bp, synthetic construct
  misc_feature 1..20: note = Description of Artificial Sequence: Synthetic oligonucleotide
  misc_feature 1..20: note = Target: ANGPTL3; (-) strand; PAM type: NRG; PAM sequence: TGG
  source 1..20: mol_type = other DNA
tagttgagggagaatataga

SEQ ID NO: 6835 - DNA, 20 bp, synthetic construct
  misc_feature 1..20: note = Description of Artificial Sequence: Synthetic oligonucleotide
  misc_feature 1..20: note = Target: ANGPTL3; (-) strand; PAM type: NRG; PAM sequence: TAG
  source 1..20: mol_type = other DNA
ttgctagttgagggagaata

SEQ ID NO: 6836 - DNA, 20 bp, synthetic construct
  misc_feature 1..20: note = Description of Artificial Sequence: Synthetic oligonucleotide
  misc_feature 1..20: note = Target: ANGPTL3; (-) strand; PAM type: NRG; PAM sequence: GAG
  source 1..20: mol_type = other DNA
catccacttgctagttgagg

SEQ ID NO: 6837 - DNA, 20 bp, synthetic construct
  misc_feature 1..20: note = Description of Artificial Sequence: Synthetic oligonucleotide
  misc_feature 1..20: note = Target: ANGPTL3; (-) strand; PAM type: NRG; PAM sequence: GGG
  source 1..20: mol_type = other DNA
ttcatccacttgctagttga

SEQ ID NO: 6838 - DNA, 20 bp, synthetic construct
  misc_feature 1..20: note = Description of Artificial Sequence: Synthetic oligonucleotide
  misc_feature 1..20: note = Target: ANGPTL3; (-) strand; PAM type: NRG; PAM sequence: AGG
  source 1..20: mol_type = other DNA
tttcatccacttgctagttg

SEQ ID NO: 6839 - DNA, 20 bp, synthetic construct
  misc_feature 1..20: note = Description of Artificial Sequence: Synthetic oligonucleotide
  misc_feature 1..20: note = Target: ANGPTL3; (-) strand; PAM type: NRG; PAM sequence: GAG
  source 1..20: mol_type = other DNA
atttcatccacttgctagtt

SEQ ID NO: 6840 - DNA, 20 bp, synthetic construct
  misc_feature 1..20: note = Description of Artificial Sequence: Synthetic oligonucleotide
  misc_feature 1..20: note = Target: ANGPTL3; (-) strand; PAM type: NRG; PAM sequence: TAG
  source 1..20: mol_type = other DNA
ctgatatttcatccacttgc

SEQ ID NO: 6841 - DNA, 20 bp, synthetic construct
  misc_feature 1..20: note = Description of Artificial Sequence: Synthetic oligonucleotide
  misc_feature 1..20: note = Target: ANGPTL3; (-) strand; PAM type: NRG; PAM sequence: TGG
  source 1..20: mol_type = other DNA
aattaagctgtcagcttttg

SEQ ID NO: 6842 - DNA, 20 bp, synthetic construct
  misc_feature 1..20: note = Description of Artificial Sequence: Synthetic oligonucleotide
  misc_feature 1..20: note = Target: ANGPTL3; (-) strand; PAM type: NRG; PAM sequence: CAG
  source 1..20: mol_type = other DNA
acttctcttaattaagctgt

SEQ ID NO: 6843 - DNA, 20 bp, synthetic construct
  misc_feature 1..20: note = Description of Artificial Sequence: Synthetic oligonucleotide
  misc_feature 1..20: note = Target: ANGPTL3; (-) strand; PAM type: NRG; PAM sequence: AAG
  source 1..20: mol_type = other DNA
tttcaaaacttctcttaatt

SEQ ID NO: 6844 - DNA, 20 bp, synthetic construct
  misc_feature 1..20: note = Description of Artificial Sequence: Synthetic oligonucleotide
  misc_feature 1..20: note = Target: ANGPTL3; (-) strand; PAM type: NRG; PAM sequence: TGG
  source 1..20: mol_type = other DNA
aaagttacagttgtaattat

SEQ ID NO: 6845 - DNA, 20 bp, synthetic construct
  misc_feature 1..20: note = Description of Artificial Sequence: Synthetic oligonucleotide
  misc_feature 1..20: note = Target: ANGPTL3; (-) strand; PAM type: NRG; PAM sequence: CAG
  source 1..20: mol_type = other DNA
ttctttaaatagaaaagtta

SEQ ID NO: 6846 - DNA, 20 bp, synthetic construct
  misc_feature 1..20: note = Description of Artificial Sequence: Synthetic oligonucleotide
  misc_feature 1..20: note = Target: ANGPTL3; (-) strand; PAM type: NRG; PAM sequence: AAG
  source 1..20: mol_type = other DNA
ttctccttctttaaatagaa

SEQ ID NO: 6847 - DNA, 20 bp, synthetic construct
  misc_feature 1..20: note = Description of Artificial Sequence: Synthetic oligonucleotide
  misc_feature 1..20: note = Target: ANGPTL3; (-) strand; PAM type: NRG; PAM sequence: TAG
  source 1..20: mol_type = other DNA
aaattttctccttctttaaa

SEQ ID NO: 6848 - DNA, 20 bp, synthetic construct
  misc_feature 1..20: note = Description of Artificial Sequence: Synthetic oligonucleotide
  misc_feature 1..20: note = Target: ANGPTL3; (-) strand; PAM type: NRG; PAM sequence: AAG
  source 1..20: mol_type = other DNA
aagtgtatgttgagctagag

SEQ ID NO: 6849 - DNA, 20 bp, synthetic construct
  misc_feature 1..20: note = Description of Artificial Sequence: Synthetic oligonucleotide
  misc_feature 1..20: note = Target: ANGPTL3; (-) strand; PAM type: NRG; PAM sequence: GAG
  source 1..20: mol_type = other DNA
tagaagtgtatgttgagcta

SEQ ID NO: 6850 - DNA, 20 bp, synthetic construct
  misc_feature 1..20: note = Description of Artificial Sequence: Synthetic oligonucleotide
  misc_feature 1..20: note = Target: ANGPTL3; (-) strand; PAM type: NRG; PAM sequence: TAG
  source 1..20: mol_type = other DNA
tatagaagtgtatgttgagc

SEQ ID NO: 6851 - DNA, 20 bp, synthetic construct
  misc_feature 1..20: note = Description of Artificial Sequence: Synthetic oligonucleotide
  misc_feature 1..20: note = Target: ANGPTL3; (-) strand; PAM type: NRG; PAM sequence: GAG
  source 1..20: mol_type = other DNA
gaattatagaagtgtatgtt

SEQ ID NO: 6852 - DNA, 20 bp, synthetic construct
  misc_feature 1..20: note = Description of Artificial Sequence: Synthetic oligonucleotide
  misc_feature 1..20: note = Target: ANGPTL3; (-) strand; PAM type: NRG; PAM sequence: AAG
  source 1..20: mol_type = other DNA
ttcatgtaatggaattatag

SEQ ID NO: 6853 - DNA, 20 bp, synthetic construct
  misc_feature 1..20: note = Description of Artificial Sequence: Synthetic oligonucleotide
  misc_feature 1..20: note = Target: ANGPTL3; (-) strand; PAM type: NRG; PAM sequence: TAG
  source 1..20: mol_type = other DNA
tggttcatgtaatggaatta

SEQ ID NO: 6854 - DNA, 20 bp, synthetic construct
  misc_feature 1..20: note = Description of Artificial Sequence: Synthetic oligonucleotide
  misc_feature 1..20: note = Target: ANGPTL3; (-) strand; PAM type: NRG; PAM sequence: TGG
  source 1..20: mol_type = other DNA
ctttactctggttcatgtaa

SEQ ID NO: 6855 - DNA, 20 bp, synthetic construct
  misc_feature 1..20: note = Description of Artificial Sequence: Synthetic oligonucleotide
  misc_feature 1..20: note = Target: ANGPTL3; (-) strand; PAM type: NRG; PAM sequence: TGG
  source 1..20: mol_type = other DNA
ttccatcttaccctttactc

SEQ ID NO: 6856 - DNA, 20 bp, synthetic construct
  misc_feature 1..20: note = Description of Artificial Sequence: Synthetic oligonucleotide
  misc_feature 1..20: note = Target: ANGPTL3; (-) strand; PAM type: NRG; PAM sequence: AAG
  source 1..20: mol_type = other DNA
atatagaaccacaaaagggt

SEQ ID NO: 6857 - DNA, 20 bp, synthetic construct
  misc_feature 1..20: note = Description of Artificial Sequence: Synthetic oligonucleotide
  misc_feature 1..20: note = Target: ANGPTL3; (-) strand; PAM type: NRG; PAM sequence: GGG
  source 1..20: mol_type = other DNA
tccaatatagaaccacaaaa

SEQ ID NO: 6858 - DNA, 20 bp, synthetic construct
  misc_feature 1..20: note = Description of Artificial Sequence: Synthetic oligonucleotide
  misc_feature 1..20: note = Target: ANGPTL3; (-) strand; PAM type: NRG; PAM sequence: AGG
  source 1..20: mol_type = other DNA
gtccaatatagaaccacaaa

SEQ ID NO: 6859 - DNA, 20 bp, synthetic construct
  misc_feature 1..20: note = Description of Artificial Sequence: Synthetic oligonucleotide
  misc_feature 1..20: note = Target: ANGPTL3; (-) strand; PAM type: NRG; PAM sequence: AAG
  source 1..20: mol_type = other DNA
tgtccaatatagaaccacaa

SEQ ID NO: 6860 - DNA, 20 bp, synthetic construct
  misc_feature 1..20: note = Description of Artificial Sequence: Synthetic oligonucleotide
  misc_feature 1..20: note = Target: ANGPTL3; (-) strand; PAM type: NRG; PAM sequence: TAG
  source 1..20: mol_type = other DNA
tgatttttaagtgtccaata

SEQ ID NO: 6861 - DNA, 20 bp, synthetic construct
  misc_feature 1..20: note = Description of Artificial Sequence: Synthetic oligonucleotide
  misc_feature 1..20: note = Target: ANGPTL3; (-) strand; PAM type: NRG; PAM sequence: AAG
  source 1..20: mol_type = other DNA
ttaggttgtgtatgattttt

SEQ ID NO: 6862 - DNA, 20 bp, synthetic construct
  misc_feature 1..20: note = Description of Artificial Sequence: Synthetic oligonucleotide
  misc_feature 1..20: note = Target: ANGPTL3; (-) strand; PAM type: NRG; PAM sequence: AGG
  source 1..20: mol_type = other DNA
aagaattacatcttttgatt

SEQ ID NO: 6863 - DNA, 20 bp, synthetic construct
  misc_feature 1..20: note = Description of Artificial Sequence: Synthetic oligonucleotide
  misc_feature 1..20: note = Target: ANGPTL3; (-) strand; PAM type: NRG; PAM sequence: TAG
  source 1..20: mol_type = other DNA
aaagaattacatcttttgat

SEQ ID NO: 6864 - DNA, 20 bp, synthetic construct
  misc_feature 1..20: note = Description of Artificial Sequence: Synthetic oligonucleotide
  misc_feature 1..20: note = Target: ANGPTL3; (-) strand; PAM type: NRG; PAM sequence: AAG
  source 1..20: mol_type = other DNA
tttggtctcgtaccttttta

SEQ ID NO: 6865 - DNA, 20 bp, synthetic construct
  misc_feature 1..20: note = Description of Artificial Sequence: Synthetic oligonucleotide
  misc_feature 1..20: note = Target: ANGPTL3; (-) strand; PAM type: NRG; PAM sequence: TGG
  source 1..20: mol_type = other DNA
agtctagattttctgaattt

SEQ ID NO: 6866 - DNA, 20 bp, synthetic construct
  misc_feature 1..20: note = Description of Artificial Sequence: Synthetic oligonucleotide
  misc_feature 1..20: note = Target: ANGPTL3; (-) strand; PAM type: NRG; PAM sequence: TAG
  source 1..20: mol_type = other DNA
tgagaaattttgttatagtc

SEQ ID NO: 6867 - DNA, 20 bp, synthetic construct
  misc_feature 1..20: note = Description of Artificial Sequence: Synthetic oligonucleotide
  misc_feature 1..20: note = Target: ANGPTL3; (-) strand; PAM type: NRG; PAM sequence: TAG
  source 1..20: mol_type = other DNA
taaattgagaaattttgtta

SEQ ID NO: 6868 - DNA, 20 bp, synthetic construct
  misc_feature 1..20: note = Description of Artificial Sequence: Synthetic oligonucleotide
  misc_feature 1..20: note = Target: ANGPTL3; (-) strand; PAM type: NRG; PAM sequence: GAG
  source 1..20: mol_type = other DNA
atattaagataatgtaaatt

SEQ ID NO: 6869 - DNA, 20 bp, synthetic construct
  misc_feature 1..20: note = Description of Artificial Sequence: Synthetic oligonucleotide
  misc_feature 1..20: note = Target: ANGPTL3; (-) strand; PAM type: NRG; PAM sequence: AAG
  source 1..20: mol_type = other DNA
gtgaaaattaattgcatatt

SEQ ID NO: 6870 - DNA, 20 bp, synthetic construct
  misc_feature 1..20: note = Description of Artificial Sequence: Synthetic oligonucleotide
  misc_feature 1..20: note = Target: ANGPTL3; (-) strand; PAM type: NRG; PAM sequence: TGG
  source 1..20: mol_type = other DNA
cccatactatagtattttac

SEQ ID NO: 6871 - DNA, 20 bp, synthetic construct
  misc_feature 1..20: note = Description of Artificial Sequence: Synthetic oligonucleotide
  misc_feature 1..20: note = Target: ANGPTL3; (-) strand; PAM type: NRG; PAM sequence: TAG
  source 1..20: mol_type = other DNA
atgcatttgtacccatacta

SEQ ID NO: 6872 - DNA, 20 bp, synthetic construct
  misc_feature 1..20: note = Description of Artificial Sequence: Synthetic oligonucleotide
  misc_feature 1..20: note = Target: ANGPTL3; (-) strand; PAM type: NRG; PAM sequence: TAG
  source 1..20: mol_type = other DNA
atattagccatttttgtaat

SEQ ID NO: 6873 - DNA, 20 bp, synthetic construct
  misc_feature 1..20: note = Description of Artificial Sequence: Synthetic oligonucleotide
  misc_feature 1..20: note = Target: ANGPTL3; (-) strand; PAM type: NRG; PAM sequence: TAG
  source 1..20: mol_type = other DNA
cactacacagtattatatat

SEQ ID NO: 6874 - DNA, 20 bp, synthetic construct
  misc_feature 1..20: note = Description of Artificial Sequence: Synthetic oligonucleotide
  misc_feature 1..20: note = Target: ANGPTL3; (-) strand; PAM type: NRG; PAM sequence: CAG
  source 1..20: mol_type = other DNA
gatgtatcataaacactaca

SEQ ID NO: 6875 - DNA, 20 bp, synthetic construct
  misc_feature 1..20: note = Description of Artificial Sequence: Synthetic oligonucleotide
  misc_feature 1..20: note = Target: ANGPTL3; (-) strand; PAM type: NRG; PAM sequence: TAG
  source 1..20: mol_type = other DNA
gtttatattttcagagcact

SEQ ID NO: 6876 - DNA, 20 bp, synthetic construct
  misc_feature 1..20: note = Description of Artificial Sequence: Synthetic oligonucleotide
  misc_feature 1..20: note = Target: ANGPTL3; (-) strand; PAM type: NRG; PAM sequence: GAG
  source 1..20: mol_type = other DNA
attaaaagtttatattttca

SEQ ID NO: 6877 - DNA, 20 bp, synthetic construct
  misc_feature 1..20: note = Description of Artificial Sequence: Synthetic oligonucleotide
  misc_feature 1..20: note = Target: ANGPTL3; (-) strand; PAM type: NRG; PAM sequence: CAG
  source 1..20: mol_type = other DNA
agattaaaagtttatatttt

SEQ ID NO: 6878 - DNA, 20 bp, synthetic construct
  misc_feature 1..20: note = Description of Artificial Sequence: Synthetic oligonucleotide
  misc_feature 1..20: note = Target: ANGPTL3; (-) strand; PAM type: NRG; PAM sequence: AAG
  source 1..20: mol_type = other DNA
agggtcgtataaaagattaa

SEQ ID NO: 6879 - DNA, 20 bp, synthetic construct
  misc_feature 1..20: note = Description of Artificial Sequence: Synthetic oligonucleotide
  misc_feature 1..20: note = Target: ANGPTL3; (-) strand; PAM type: NRG; PAM sequence: AAG
  source 1..20: mol_type = other DNA
tattttatagggtcgtataa

SEQ ID NO: 6880 - DNA, 20 bp, synthetic construct
  misc_feature 1..20: note = Description of Artificial Sequence: Synthetic oligonucleotide
  misc_feature 1..20: note = Target: ANGPTL3; (-) strand; PAM type: NRG; PAM sequence: GGG
  source 1..20: mol_type = other DNA
agaataacacctattttata

SEQ ID NO: 6881 - DNA, 20 bp, synthetic construct
  misc_feature 1..20: note = Description of Artificial Sequence: Synthetic oligonucleotide
  misc_feature 1..20: note = Target: ANGPTL3; (-) strand; PAM type: NRG; PAM sequence: AGG
  source 1..20: mol_type = other DNA
gagaataacacctattttat

SEQ ID NO: 6882 - DNA, 20 bp, synthetic construct
  misc_feature 1..20: note = Description of Artificial Sequence: Synthetic oligonucleotide
  misc_feature 1..20: note = Target: ANGPTL3; (-) strand; PAM type: NRG; PAM sequence: TAG
  source 1..20: mol_type = other DNA
tgagaataacacctatttta

SEQ ID NO: 6883 - DNA, 20 bp, synthetic construct
  misc_feature 1..20: note = Description of Artificial Sequence: Synthetic oligonucleotide
  misc_feature 1..20: note = Target: ANGPTL3; (-) strand; PAM type: NRG; PAM sequence: GAG
  source 1..20: mol_type = other DNA
tgttttctcatctctccagt

SEQ ID NO: 6884 - DNA, 20 bp, synthetic construct
  misc_feature 1..20: note = Description of Artificial Sequence: Synthetic oligonucleotide
  misc_feature 1..20: note = Target: ANGPTL3; (-) strand; PAM type: NRG; PAM sequence: CAG
  source 1..20: mol_type = other DNA
cccctgttttctcatctctc

SEQ ID NO: 6885 - DNA, 20 bp, synthetic construct
  misc_feature 1..20: note = Description of Artificial Sequence: Synthetic oligonucleotide
  misc_feature 1..20: note = Target: ANGPTL3; (-) strand; PAM type: NRG; PAM sequence: TGG
  source 1..20: mol_type = other DNA
ttcttcagctttgtgacctt

SEQ ID NO: 6886 - DNA, 20 bp, synthetic construct
  misc_feature 1..20: note = Description of Artificial Sequence: Synthetic oligonucleotide
  misc_feature 1..20: note = Target: ANGPTL3; (-) strand; PAM type: NRG; PAM sequence: CAG
  source 1..20: mol_type = other DNA
atcccggatttcatattctt

SEQ ID NO: 6887 - DNA, 20 bp, synthetic construct
  misc_feature 1..20: note = Description of Artificial Sequence: Synthetic oligonucleotide
  misc_feature 1..20: note = Target: ANGPTL3; (-) strand; PAM type: NRG; PAM sequence: CGG
  source 1..20: mol_type = other DNA
gactgcctgaatcagaatcc

SEQ ID NO: 6888 - DNA, 20 bp, synthetic construct
  misc_feature 1..20: note = Description of Artificial Sequence: Synthetic oligonucleotide
  misc_feature 1..20: note = Target: ANGPTL3; (-) strand; PAM type: NRG; PAM sequence: CAG
  source 1..20: mol_type = other DNA
tggaataagactgcctgaat

SEQ ID NO: 6889 - DNA, 20 bp, synthetic construct
  misc_feature 1..20: note = Description of Artificial Sequence: Synthetic oligonucleotide
  misc_feature 1..20: note = Target: ANGPTL3; (-) strand; PAM type: NRG; PAM sequence: AAG
  source 1..20: mol_type = other DNA
taagagcatgattctggaat

SEQ ID NO: 6890 - DNA, 20 bp, synthetic construct
  misc_feature 1..20: note = Description of Artificial Sequence: Synthetic oligonucleotide
  misc_feature 1..20: note = Target: ANGPTL3; (-) strand; PAM type: NRG; PAM sequence: TGG
  source 1..20: mol_type = other DNA
agtggttaagagcatgattc

SEQ ID NO: 6891 - DNA, 20 bp, synthetic construct
  misc_feature 1..20: note = Description of Artificial Sequence: Synthetic oligonucleotide
  misc_feature 1..20: note = Target: ANGPTL3; (-) strand; PAM type: NRG; PAM sequence: GAG
  source 1..20: mol_type = other DNA
cagtattccatagtggttaa

SEQ ID NO: 6892 - DNA, 20 bp, synthetic construct
  misc_feature 1..20: note = Description of Artificial Sequence: Synthetic oligonucleotide
  misc_feature 1..20: note = Target: ANGPTL3; (-) strand; PAM type: NRG; PAM sequence: AAG
  source 1..20: mol_type = other DNA
ggcagtattccatagtggtt

SEQ ID NO: 6893 - DNA, 20 bp, synthetic construct
  misc_feature 1..20: note = Description of Artificial Sequence: Synthetic oligonucleotide
  misc_feature 1..20: note = Target: ANGPTL3; (-) strand; PAM type: NRG; PAM sequence: TGG
  source 1..20: mol_type = other DNA
gtagaggcagtattccatag

SEQ ID NO: 6894 - DNA, 20 bp, synthetic construct
  misc_feature 1..20: note = Description of Artificial Sequence: Synthetic oligonucleotide
  misc_feature 1..20: note = Target: ANGPTL3; (-) strand; PAM type: NRG; PAM sequence: TAG
  source 1..20: mol_type = other DNA
acagtagaggcagtattcca

SEQ ID NO: 6895 - DNA, 20 bp, synthetic construct
  misc_feature 1..20: note = Description of Artificial Sequence: Synthetic oligonucleotide
  misc_feature 1..20: note = Target: ANGPTL3; (-) strand; PAM type: NRG; PAM sequence: CAG
  source 1..20: mol_type = other DNA
tataatagttacagtagagg

SEQ ID NO: 6896 - DNA, 20 bp, synthetic construct
  misc_feature 1..20: note = Description of Artificial Sequence: Synthetic oligonucleotide
  misc_feature 1..20: note = Target: ANGPTL3; (-) strand; PAM type: NRG; PAM sequence: AGG
  source 1..20: mol_type = other DNA
gggtataatagttacagtag

SEQ ID NO: 6897 - DNA, 20 bp, synthetic construct
  misc_feature 1..20: note = Description of Artificial Sequence: Synthetic oligonucleotide
  misc_feature 1..20: note = Target: ANGPTL3; (-) strand; PAM type: NRG; PAM sequence: GAG
  source 1..20: mol_type = other DNA
tgggtataatagttacagta

SEQ ID NO: 6898 - DNA, 20 bp, synthetic construct
  misc_feature 1..20: note = Description of Artificial Sequence: Synthetic oligonucleotide
  misc_feature 1..20: note = Target: ANGPTL3; (-) strand; PAM type: NRG; PAM sequence: TAG
  source 1..20: mol_type = other DNA
tttgggtataatagttacag

SEQ ID NO: 6899 - DNA, 20 bp, synthetic construct
  misc_feature 1..20: note = Description of Artificial Sequence: Synthetic oligonucleotide
  misc_feature 1..20: note = Target: ANGPTL3; (-) strand; PAM type: NRG; PAM sequence: CAG
  source 1..20: mol_type = other DNA
ggttttgggtataatagtta

SEQ ID NO: 6900 - DNA, 20 bp, synthetic construct
  misc_feature 1..20: note = Description of Artificial Sequence: Synthetic oligonucleotide
  misc_feature 1..20: note = Target: ANGPTL3; (-) strand; PAM type: NRG; PAM sequence: TAG
  source 1..20: mol_type = other DNA
attaagggttttgggtataa

SEQ ID NO: 6901 - DNA, 20 bp, synthetic construct
  misc_feature 1..20: note = Description of Artificial Sequence: Synthetic oligonucleotide
  misc_feature 1..20: note = Target: ANGPTL3; (-) strand; PAM type: NRG; PAM sequence: GGG
  source 1..20: mol_type = other DNA
gacttaggattaagggtttt

SEQ ID NO: 6902 - DNA, 20 bp, synthetic construct
  misc_feature 1..20: note = Description of Artificial Sequence: Synthetic oligonucleotide
  misc_feature 1..20: note = Target: ANGPTL3; (-) strand; PAM type: NRG; PAM sequence: TGG
  source 1..20: mol_type = other DNA
tgacttaggattaagggttt

SEQ ID NO: 6903 - DNA, 20 bp, synthetic construct
  misc_feature 1..20: note = Description of Artificial Sequence: Synthetic oligonucleotide
  misc_feature 1..20: note = Target: ANGPTL3; (-) strand; PAM type: NRG; PAM sequence: GGG
  source 1..20: mol_type = other DNA
ttttgatgacttaggattaa

SEQ ID NO: 6904 - DNA, 20 bp, synthetic construct
  misc_feature 1..20: note = Description of Artificial Sequence: Synthetic oligonucleotide
  misc_feature 1..20: note = Target: ANGPTL3; (-) strand; PAM type: NRG; PAM sequence: AGG
  source 1..20: mol_type = other DNA
cttttgatgacttaggatta

SEQ ID NO: 6905 - DNA, 20 bp, synthetic construct
  misc_feature 1..20: note = Description of Artificial Sequence: Synthetic oligonucleotide
  misc_feature 1..20: note = Target: ANGPTL3; (-) strand; PAM type: NRG; PAM sequence: AAG
  source 1..20: mol_type = other DNA
ccttttgatgacttaggatt

SEQ ID NO: 6906 - DNA, 20 bp, synthetic construct
  misc_feature 1..20: note = Description of Artificial Sequence: Synthetic oligonucleotide
  misc_feature 1..20: note = Target: ANGPTL3; (-) strand; PAM type: NRG; PAM sequence: AGG
  source 1..20: mol_type = other DNA
gctcttccttttgatgactt

SEQ ID NO: 6907 - DNA, 20 bp, synthetic construct
  misc_feature 1..20: note = Description of Artificial Sequence: Synthetic oligonucleotide
  misc_feature 1..20: note = Target: ANGPTL3; (-) strand; PAM type: NRG; PAM sequence: TAG
  source 1..20: mol_type = other DNA
ggctcttccttttgatgact

SEQ ID NO: 6908 - DNA, 20 bp, synthetic construct
  misc_feature 1..20: note = Description of Artificial Sequence: Synthetic oligonucleotide
  misc_feature 1..20: note = Target: ANGPTL3; (-) strand; PAM type: NRG; PAM sequence: AGG
  source 1..20: mol_type = other DNA
ctcttcattgtgtaaaatag

SEQ ID NO: 6909 - DNA, 20 bp, synthetic construct
  misc_feature 1..20: note = Description of Artificial Sequence: Synthetic oligonucleotide
  misc_feature 1..20: note = Target: ANGPTL3; (-) strand; PAM type: NRG; PAM sequence: GAG
  source 1..20: mol_type = other DNA
cctcttcattgtgtaaaata

SEQ ID NO: 6910 - DNA, 20 bp, synthetic construct
  misc_feature 1..20: note = Description of Artificial Sequence: Synthetic oligonucleotide
  misc_feature 1..20: note = Target: ANGPTL3; (-) strand; PAM type: NRG; PAM sequence: TAG
  source 1..20: mol_type = other DNA
tgcctcttcattgtgtaaaa

SEQ ID NO: 6911 - DNA, 20 bp, synthetic construct
  misc_feature 1..20: note = Description of Artificial Sequence: Synthetic oligonucleotide
  misc_feature 1..20: note = Target: ANGPTL3; (-) strand; PAM type: NRG; PAM sequence: TAG
  source 1..20: mol_type = other DNA
cgtccctaaatttctattct

SEQ ID NO: 6912 - DNA, 20 bp, synthetic construct
  misc_feature 1..20: note = Description of Artificial Sequence: Synthetic oligonucleotide
  misc_feature 1..20: note = Target: ANGPTL3; (-) strand; PAM type: NRG; PAM sequence: AAG
  source 1..20: mol_type = other DNA
agtgctgatattaaaggagt

SEQ ID NO: 6913 - DNA, 20 bp, synthetic construct
  misc_feature 1..20: note = Description of Artificial Sequence: Synthetic oligonucleotide
  misc_feature 1..20: note = Target: ANGPTL3; (-) strand; PAM type: NRG; PAM sequence: GAG
  source 1..20: mol_type = other DNA
tcaaagtgctgatattaaag

SEQ ID NO: 6914 - DNA, 20 bp, synthetic construct
  misc_feature 1..20: note = Description of Artificial Sequence: Synthetic oligonucleotide
  misc_feature 1..20: note = Target: ANGPTL3; (-) strand; PAM type: NRG; PAM sequence: AGG
  source 1..20: mol_type = other DNA
tctcaaagtgctgatattaa

SEQ ID NO: 6915 - DNA, 20 bp, synthetic construct
  misc_feature 1..20: note = Description of Artificial Sequence: Synthetic oligonucleotide
  misc_feature 1..20: note = Target: ANGPTL3; (-) strand; PAM type: NRG; PAM sequence: AAG
  source 1..20: mol_type = other DNA
ctctcaaagtgctgatatta

SEQ ID NO: 6916 - DNA, 20 bp, synthetic construct
  misc_feature 1..20: note = Description of Artificial Sequence: Synthetic oligonucleotide
  misc_feature 1..20: note = Target: ANGPTL3; (-) strand; PAM type: NRG; PAM sequence: AAG
  source 1..20: mol_type = other DNA
cctcccatatcagcctctca

SEQ ID NO: 6917 - DNA, 20 bp, synthetic construct
  misc_feature 1..20: note = Description of Artificial Sequence: Synthetic oligonucleotide
  misc_feature 1..20: note = Target: ANGPTL3; (-) strand; PAM type: NRG; PAM sequence: CAG
  source 1..20: mol_type = other DNA
ttcaagtgaacctcccatat

SEQ ID NO: 6918 - DNA, 20 bp, synthetic construct
  misc_feature 1..20: note = Description of Artificial Sequence: Synthetic oligonucleotide
  misc_feature 1..20: note = Target: ANGPTL3; (-) strand; PAM type: NRG; PAM sequence: AAG
  source 1..20: mol_type = other DNA
gaccttgaactcctgacttc

SEQ ID NO: 6919 - DNA, 20 bp, synthetic construct
  misc_feature 1..20: note = Description of Artificial Sequence: Synthetic oligonucleotide
  misc_feature 1..20: note = Target: ANGPTL3; (-) strand; PAM type: NRG; PAM sequence: AAG
  source 1..20: mol_type = other DNA
tgtgtttcactatgttgccc

SEQ ID NO: 6920 - DNA, 20 bp, synthetic construct
  misc_feature 1..20: note = Description of Artificial Sequence: Synthetic oligonucleotide
  misc_feature 1..20: note = Target: ANGPTL3; (-) strand; PAM type: NRG; PAM sequence: GAG
  source 1..20: mol_type = other DNA
taatttttaaatattttgta

SEQ ID NO: 6921 - DNA, 20 bp, synthetic construct
  misc_feature 1..20: note = Description of Artificial Sequence: Synthetic oligonucleotide
  misc_feature 1..20: note = Target: ANGPTL3; (-) strand; PAM type: NRG; PAM sequence: TAG
  source 1..20: mol_type = other DNA
gctaatttttaaatattttg

SEQ ID NO: 6922 - DNA, 20 bp, synthetic construct
  misc_feature 1..20: note = Description of Artificial Sequence: Synthetic oligonucleotide
  misc_feature 1..20: note = Target: ANGPTL3; (-) strand; PAM type: NRG; PAM sequence: CAG
  source 1..20: mol_type = other DNA
tagatgcatgccaccacacc

SEQ ID NO: 6923 - DNA, 20 bp, synthetic construct
  misc_feature 1..20: note = Description of Artificial Sequence: Synthetic oligonucleotide
  misc_feature 1..20: note = Target: ANGPTL3; (-) strand; PAM type: NRG; PAM sequence: TAG
  source 1..20: mol_type = other DNA
ctcccaagtagctgagacta

SEQ ID NO: 6924 - DNA, 20 bp, synthetic construct
  misc_feature 1..20: note = Description of Artificial Sequence: Synthetic oligonucleotide
  misc_feature 1..20: note = Target: ANGPTL3; (-) strand; PAM type: NRG; PAM sequence: GAG
  source 1..20: mol_type = other DNA
cctctgtctcccaagtagct

SEQ ID NO: 6925 - DNA, 20 bp, synthetic construct
  misc_feature 1..20: note = Description of Artificial Sequence: Synthetic oligonucleotide
  misc_feature 1..20: note = Target: ANGPTL3; (-) strand; PAM type: NRG; PAM sequence: TAG
  source 1..20: mol_type = other DNA
tcctccctctgtctcccaag

SEQ ID NO: 6926 - DNA, 20 bp, synthetic construct
  misc_feature 1..20: note = Description of Artificial Sequence: Synthetic oligonucleotide
  misc_feature 1..20: note = Target: ANGPTL3; (-) strand; PAM type: NRG; PAM sequence: AAG
  source 1..20: mol_type = other DNA
gcctcctccctctgtctccc

SEQ ID NO: 6927 - DNA, 20 bp, synthetic construct
  misc_feature 1..20: note = Description of Artificial Sequence: Synthetic oligonucleotide
  misc_feature 1..20: note = Target: ANGPTL3; (-) strand; PAM type: NRG; PAM sequence: AAG
  source 1..20: mol_type = other DNA
acgaactcctgggctcgagc

SEQ ID NO: 6928 - DNA, 20 bp, synthetic construct
  misc_feature 1..20: note = Description of Artificial Sequence: Synthetic oligonucleotide
  misc_feature 1..20: note = Target: ANGPTL3; (-) strand; PAM type: NRG; PAM sequence: GAG
  source 1..20: mol_type = other DNA
agccacgaactcctgggctc

SEQ ID NO: 6929 - DNA, 20 bp, synthetic construct
  misc_feature 1..20: note = Description of Artificial Sequence: Synthetic oligonucleotide
  misc_feature 1..20: note = Target: ANGPTL3; (-) strand; PAM type: NRG; PAM sequence: GGG
  source 1..20: mol_type = other DNA
cactatagccacgaactcct

SEQ ID NO: 6930 - DNA, 20 bp, synthetic construct
  misc_feature 1..20: note = Description of Artificial Sequence: Synthetic oligonucleotide
  misc_feature 1..20: note = Target: ANGPTL3; (-) strand; PAM type: NRG; PAM sequence: TGG
  source 1..20: mol_type = other DNA
tcactatagccacgaactcc

SEQ ID NO: 6931 - DNA, 20 bp, synthetic construct
  misc_feature 1..20: note = Description of Artificial Sequence: Synthetic oligonucleotide
  misc_feature 1..20: note = Target: ANGPTL3; (-) strand; PAM type: NRG; PAM sequence: TAG
  source 1..20: mol_type = other DNA
ggcatgatcatagctcacta

SEQ ID NO: 6932 - DNA, 20 bp, synthetic construct
  misc_feature 1..20: note = Description of Artificial Sequence: Synthetic oligonucleotide
  misc_feature 1..20: note = Target: ANGPTL3; (-) strand; PAM type: NRG; PAM sequence: TAG
  source 1..20: mol_type = other DNA
ggagtgcagtggcatgatca

SEQ ID NO: 6933 - DNA, 20 bp, synthetic construct
  misc_feature 1..20: note = Description of Artificial Sequence: Synthetic oligonucleotide
  misc_feature 1..20: note = Target: ANGPTL3; (-) strand; PAM type: NRG; PAM sequence: TGG
  source 1..20: mol_type = other DNA
ttgtccaggctggagtgcag

SEQ ID NO: 6934 - DNA, 20 bp, synthetic construct
  misc_feature 1..20: note = Description of Artificial Sequence: Synthetic oligonucleotide
  misc_feature 1..20: note = Target: ANGPTL3; (-) strand; PAM type: NRG; PAM sequence: CAG
  source 1..20: mol_type = other DNA
ctgttgtccaggctggagtg

SEQ ID NO: 6935 - DNA, 20 bp, synthetic construct
  misc_feature 1..20: note = Description of Artificial Sequence: Synthetic oligonucleotide
  misc_feature 1..20: note = Target: ANGPTL3; (-) strand; PAM type: NRG; PAM sequence: GAG
  source 1..20: mol_type = other DNA
ttgctctgttgtccaggctg

SEQ ID NO: 6936 - DNA, 20 bp, synthetic construct
  misc_feature 1..20: note = Description of Artificial Sequence: Synthetic oligonucleotide
  misc_feature 1..20: note = Target: ANGPTL3; (-) strand; PAM type: NRG; PAM sequence: TGG
  source 1..20: mol_type = other DNA
tcttgctctgttgtccaggc

SEQ ID NO: 6937 - DNA, 20 bp, synthetic construct
  misc_feature 1..20: note = Description of Artificial Sequence: Synthetic oligonucleotide
  misc_feature 1..20: note = Target: ANGPTL3; (-) strand; PAM type: NRG; PAM sequence: AGG
  source 1..20: mol_type = other DNA
agggtcttgctctgttgtcc

SEQ ID NO: 6938 - DNA, 20 bp, synthetic construct
  misc_feature 1..20: note = Description of Artificial Sequence: Synthetic oligonucleotide
  misc_feature 1..20: note = Target: ANGPTL3; (-) strand; PAM type: NRG; PAM sequence: CAG
  source 1..20: mol_type = other DNA
cagggtcttgctctgttgtc

SEQ ID NO: 6939 - DNA, 20 bp, synthetic construct
  misc_feature 1..20: note = Description of Artificial Sequence: Synthetic oligonucleotide
  misc_feature 1..20: note = Target: ANGPTL3; (-) strand; PAM type: NRG; PAM sequence: GGG
  source 1..20: mol_type = other DNA
tcttttcttttttagagaca

SEQ ID NO: 6940 - DNA, 20 bp, synthetic construct
  misc_feature 1..20: note = Description of Artificial Sequence: Synthetic oligonucleotide
  misc_feature 1..20: note = Target: ANGPTL3; (-) strand; PAM type: NRG; PAM sequence: AGG
  source 1..20: mol_type = other DNA
ttcttttcttttttagagac

SEQ ID NO: 6941 - DNA, 20 bp, synthetic construct
  misc_feature 1..20: note = Description of Artificial Sequence: Synthetic oligonucleotide
  misc_feature 1..20: note = Target: ANGPTL3; (-) strand; PAM type: NRG; PAM sequence: CAG
  source 1..20: mol_type = other DNA
tttcttttcttttttagaga

SEQ ID NO: 6942 - DNA, 20 bp, synthetic construct
  misc_feature 1..20: note = Description of Artificial Sequence: Synthetic oligonucleotide
  misc_feature 1..20: note = Target: ANGPTL3; (-) strand; PAM type: NRG; PAM sequence: GAG
  source 1..20: mol_type = other DNA
caaatttcttttctttttta

SEQ ID NO: 6943 - DNA, 20 bp, synthetic construct
  misc_feature 1..20: note = Description of Artificial Sequence: Synthetic oligonucleotide
  misc_feature 1..20: note = Target: ANGPTL3; (-) strand; PAM type: NRG; PAM sequence: TAG
  source 1..20: mol_type = other DNA
tccaaatttcttttcttttt

SEQ ID NO: 6944 - DNA, 20 bp, synthetic construct
  misc_feature 1..20: note = Description of Artificial Sequence: Synthetic oligonucleotide
  misc_feature 1..20: note = Target: ANGPTL3; (-) strand; PAM type: NRG; PAM sequence: CAG
  source 1..20: mol_type = other DNA
agttttatcataataaattt

SEQ ID NO: 6945 - DNA, 20 bp, synthetic construct
  misc_feature 1..20: note = Description of Artificial Sequence: Synthetic oligonucleotide
  misc_feature 1..20: note = Target: ANGPTL3; (-) strand; PAM type: NRG; PAM sequence: AAG
  source 1..20: mol_type = other DNA
tagctttttaacacagggaa

SEQ ID NO: 6946 - DNA, 20 bp, synthetic construct
  misc_feature 1..20: note = Description of Artificial Sequence: Synthetic oligonucleotide
  misc_feature 1..20: note = Target: ANGPTL3; (-) strand; PAM type: NRG; PAM sequence: GGG
  source 1..20: mol_type = other DNA
gttaatagctttttaacaca

SEQ ID NO: 6947 - DNA, 20 bp, synthetic construct
  misc_feature 1..20: note = Description of Artificial Sequence: Synthetic oligonucleotide
  misc_feature 1..20: note = Target: ANGPTL3; (-) strand; PAM type: NRG; PAM sequence: AGG
  source 1..20: mol_type = other DNA
agttaatagctttttaacac

SEQ ID NO: 6948 - DNA, 20 bp, synthetic construct
  misc_feature 1..20: note = Description of Artificial Sequence: Synthetic oligonucleotide
  misc_feature 1..20: note = Target: ANGPTL3; (-) strand; PAM type: NRG; PAM sequence: CAG
  source 1..20: mol_type = other DNA
aagttaatagctttttaaca

SEQ ID NO: 6949 - DNA, 20 bp, synthetic construct
  misc_feature 1..20: note = Description of Artificial Sequence: Synthetic oligonucleotide
  misc_feature 1..20: note = Target: ANGPTL3; (-) strand; PAM type: NRG; PAM sequence: TAG
  source 1..20: mol_type = other DNA
gaaatttttcataaagttaa

SEQ ID NO: 6950 - DNA, 20 bp, synthetic construct
  misc_feature 1..20: note = Description of Artificial Sequence: Synthetic oligonucleotide
  misc_feature 1..20: note = Target: ANGPTL3; (-) strand; PAM type: NRG; PAM sequence: AAG
  source 1..20: mol_type = other DNA
cctaaaagaaatttttcata

SEQ ID NO: 6951 - DNA, 20 bp, synthetic construct
  misc_feature 1..20: note = Description of Artificial Sequence: Synthetic oligonucleotide
  misc_feature 1..20: note = Target: ANGPTL3; (-) strand; PAM type: NRG; PAM sequence: AAG
  source 1..20: mol_type = other DNA
atataatcaaccttacctaa

SEQ ID NO: 6952 - DNA, 20 bp, synthetic construct
  misc_feature 1..20: note = Description of Artificial Sequence: Synthetic oligonucleotide
  misc_feature 1..20: note = Target: ANGPTL3; (-) strand; PAM type: NRG; PAM sequence: GGG
  source 1..20: mol_type = other DNA
tttaacctgtgtatgtgtgt

SEQ ID NO: 6953 - DNA, 20 bp, synthetic construct
  misc_feature 1..20: note = Description of Artificial Sequence: Synthetic oligonucleotide
  misc_feature 1..20: note = Target: ANGPTL3; (-) strand; PAM type: NRG; PAM sequence: TGG
  source 1..20: mol_type = other DNA
ttttaacctgtgtatgtgtg

SEQ ID NO: 6954 - DNA, 20 bp, synthetic construct
  misc_feature 1..20: note = Description of Artificial Sequence: Synthetic oligonucleotide
  misc_feature 1..20: note = Target: ANGPTL3; (-) strand; PAM type: NRG; PAM sequence: TAG
  source 1..20: mol_type = other DNA
acaggtagtgctcaaaatgc

SEQ ID NO: 6955 - DNA, 20 bp, synthetic construct
  misc_feature 1..20: note = Description of Artificial Sequence: Synthetic oligonucleotide
  misc_feature 1..20: note = Target: ANGPTL3; (-) strand; PAM type: NRG; PAM sequence: TAG
  source 1..20: mol_type = other DNA
aacagtgctgggcaaacagg

SEQ ID NO: 6956 - DNA, 20 bp, synthetic construct
  misc_feature 1..20: note = Description of Artificial Sequence: Synthetic oligonucleotide
  misc_feature 1..20: note = Target: ANGPTL3; (-) strand; PAM type: NRG; PAM sequence: AGG
  source 1..20: mol_type = other DNA
tagaacagtgctgggcaaac

SEQ ID NO: 6957 - DNA, 20 bp, synthetic construct
  misc_feature 1..20: note = Description of Artificial Sequence: Synthetic oligonucleotide
  misc_feature 1..20: note = Target: ANGPTL3; (-) strand; PAM type: NRG; PAM sequence: CAG
  source 1..20: mol_type = other DNA
ttagaacagtgctgggcaaa

SEQ ID NO: 6958 - DNA, 20 bp, synthetic construct
  misc_feature 1..20: note = Description of Artificial Sequence: Synthetic oligonucleotide
  misc_feature 1..20: note = Target: ANGPTL3; (-) strand; PAM type: NRG; PAM sequence: GGG
  source 1..20: mol_type = other DNA
agagcacttagaacagtgct

SEQ ID NO: 6959 - DNA, 20 bp, synthetic construct
  misc_feature 1..20: note = Description of Artificial Sequence: Synthetic oligonucleotide
  misc_feature 1..20: note = Target: ANGPTL3; (-) strand; PAM type: NRG; PAM sequence: TGG
  source 1..20: mol_type = other DNA
tagagcacttagaacagtgc

SEQ ID NO: 6960 - DNA, 20 bp, synthetic construct
  misc_feature 1..20: note = Description of Artificial Sequence: Synthetic oligonucleotide
  misc_feature 1..20: note = Target: ANGPTL3; (-) strand; PAM type: NRG; PAM sequence: CAG
  source 1..20: mol_type = other DNA
tacatgtagagcacttagaa

SEQ ID NO: 6961 - DNA, 20 bp, synthetic construct
  misc_feature 1..20: note = Description of Artificial Sequence: Synthetic oligonucleotide
  misc_feature 1..20: note = Target: ANGPTL3; (-) strand; PAM type: NRG; PAM sequence: TAG
  source 1..20: mol_type = other DNA
aataatacatgtagagcact

SEQ ID NO: 6962 - DNA, 20 bp, synthetic construct
  misc_feature 1..20: note = Description of Artificial Sequence: Synthetic oligonucleotide
  misc_feature 1..20: note = Target: ANGPTL3; (-) strand; PAM type: NRG; PAM sequence: GAG
  source 1..20: mol_type = other DNA
atttaacaataatacatgta

SEQ ID NO: 6963 - DNA, 20 bp, synthetic construct
  misc_feature 1..20: note = Description of Artificial Sequence: Synthetic oligonucleotide
  misc_feature 1..20: note = Target: ANGPTL3; (-) strand; PAM type: NRG; PAM sequence: TAG
  source 1..20: mol_type = other DNA
taatttaacaataatacatg

SEQ ID NO: 6964 - DNA, 20 bp, synthetic construct
  misc_feature 1..20: note = Description of Artificial Sequence: Synthetic oligonucleotide
  misc_feature 1..20: note = Target: ANGPTL3; (-) strand; PAM type: NRG; PAM sequence: TAG
  source 1..20: mol_type = other DNA
taattatagtacataattca

SEQ ID NO: 6965 - DNA, 20 bp, synthetic construct
  misc_feature 1..20: note = Description of Artificial Sequence: Synthetic oligonucleotide
  misc_feature 1..20: note = Target: ANGPTL3; (-) strand; PAM type: NRG; PAM sequence: TAG
  source 1..20: mol_type = other DNA
ctgtaaagctggggtaatta

SEQ ID NO: 6966 - DNA, 20 bp, synthetic construct
  misc_feature 1..20: note = Description of Artificial Sequence: Synthetic oligonucleotide
  misc_feature 1..20: note = Target: ANGPTL3; (-) strand; PAM type: NRG; PAM sequence: GGG
  source 1..20: mol_type = other DNA
tctcctcatctgtaaagctg

SEQ ID NO: 6967 - DNA, 20 bp, synthetic construct
  misc_feature 1..20: note = Description of Artificial Sequence: Synthetic oligonucleotide
  misc_feature 1..20: note = Target: ANGPTL3; (-) strand; PAM type: NRG; PAM sequence: GGG
  source 1..20: mol_type = other DNA
gtctcctcatctgtaaagct

SEQ ID NO: 6968 - DNA, 20 bp, synthetic construct
  misc_feature 1..20: note = Description of Artificial Sequence: Synthetic oligonucleotide
  misc_feature 1..20: note = Target: ANGPTL3; (-) strand; PAM type: NRG; PAM sequence: TGG
  source 1..20: mol_type = other DNA
agtctcctcatctgtaaagc

SEQ ID NO: 6969 - DNA, 20 bp, synthetic construct
  misc_feature 1..20: note = Description of Artificial Sequence: Synthetic oligonucleotide
  misc_feature 1..20: note = Target: ANGPTL3; (-) strand; PAM type: NRG; PAM sequence: AAG
  source 1..20: mol_type = other DNA
gattagtctcctcatctgta

SEQ ID NO: 6970 - DNA, 20 bp, synthetic construct
  misc_feature 1..20: note = Description of Artificial Sequence: Synthetic oligonucleotide
  misc_feature 1..20: note = Target: ANGPTL3; (-) strand; PAM type: NRG; PAM sequence: TAG
  source 1..20: mol_type = other DNA
tacttaacctccccatggat

SEQ ID NO: 6971 - DNA, 20 bp, synthetic construct
  misc_feature 1..20: note = Description of Artificial Sequence: Synthetic oligonucleotide
  misc_feature 1..20: note = Target: ANGPTL3; (-) strand; PAM type: NRG; PAM sequence: TGG
  source 1..20: mol_type = other DNA
caagttacttaacctcccca

SEQ ID NO: 6972 - DNA, 20 bp, synthetic construct
  misc_feature 1..20: note = Description of Artificial Sequence: Synthetic oligonucleotide
  misc_feature 1..20: note = Target: ANGPTL3; (-) strand; PAM type: NRG; PAM sequence: AAG
  source 1..20: mol_type = other DNA
ctagctgtctggccttggac

SEQ ID NO: 6973 - DNA, 20 bp, synthetic construct
  misc_feature 1..20: note = Description of Artificial Sequence: Synthetic oligonucleotide
  misc_feature 1..20: note = Target: ANGPTL3; (-) strand; PAM type: NRG; PAM sequence: TGG
  source 1..20: mol_type = other DNA
cggctctagctgtctggcct

SEQ ID NO: 6974 - DNA, 20 bp, synthetic construct
  misc_feature 1..20: note = Description of Artificial Sequence: Synthetic oligonucleotide
  misc_feature 1..20: note = Target: ANGPTL3; (-) strand; PAM type: NRG; PAM sequence: TGG
  source 1..20: mol_type = other DNA
aaaagccggctctagctgtc

SEQ ID NO: 6975 - DNA, 20 bp, synthetic construct
  misc_feature 1..20: note = Description of Artificial Sequence: Synthetic oligonucleotide
  misc_feature 1..20: note = Target: ANGPTL3; (-) strand; PAM type: NRG; PAM sequence: TAG
  source 1..20: mol_type = other DNA
gtgggtccaaaagccggctc

SEQ ID NO: 6976 - DNA, 20 bp, synthetic construct
  misc_feature 1..20: note = Description of Artificial Sequence: Synthetic oligonucleotide
  misc_feature 1..20: note = Target: ANGPTL3; (-) strand; PAM type: NRG; PAM sequence: CGG
  source 1..20: mol_type = other DNA
tgtggtgtgggtccaaaagc

SEQ ID NO: 6977 - DNA, 20 bp, synthetic construct
  misc_feature 1..20: note = Description of Artificial Sequence: Synthetic oligonucleotide
  misc_feature 1..20: note = Target: ANGPTL3; (-) strand; PAM type: NRG; PAM sequence: AAG
  source 1..20: mol_type = other DNA
agactgtggtgtgggtccaa

SEQ ID NO: 6978 - DNA, 20 bp, synthetic construct
  misc_feature 1..20: note = Description of Artificial Sequence: Synthetic oligonucleotide
  misc_feature 1..20: note = Target: ANGPTL3; (-) strand; PAM type: NRG; PAM sequence: GGG
  source 1..20: mol_type = other DNA
ctggagtcagactgtggtgt

SEQ ID NO: 6979 - DNA, 20 bp, synthetic construct
  misc_feature 1..20: note = Description of Artificial Sequence: Synthetic oligonucleotide
  misc_feature 1..20: note = Target: ANGPTL3; (-) strand; PAM type: NRG; PAM sequence: TGG
  source 1..20: mol_type = other DNA
gctggagtcagactgtggtg

SEQ ID NO: 6980 - DNA, 20 bp, synthetic construct
  misc_feature 1..20: note = Description of Artificial Sequence: Synthetic oligonucleotide
  misc_feature 1..20: note = Target: ANGPTL3; (-) strand; PAM type: NRG; PAM sequence: TGG
  source 1..20: mol_type = other DNA
tgggtgctggagtcagactg

SEQ ID NO: 6981 - DNA, 20 bp, synthetic construct
  misc_feature 1..20: note = Description of Artificial Sequence: Synthetic oligonucleotide
  misc_feature 1..20: note = Target: ANGPTL3; (-) strand; PAM type: NRG; PAM sequence: CAG
  source 1..20: mol_type = other DNA
aagaatatgggtgctggagt

SEQ ID NO: 6982 - DNA, 20 bp, synthetic construct
  misc_feature 1..20: note = Description of Artificial Sequence: Synthetic oligonucleotide
  misc_feature 1..20: note = Target: ANGPTL3; (-) strand; PAM type: NRG; PAM sequence: GAG
  source 1..20: mol_type = other DNA
tgttaagaatatgggtgctg

SEQ ID NO: 6983 - DNA, 20 bp, synthetic construct
  misc_feature 1..20: note = Description of Artificial Sequence: Synthetic oligonucleotide
  misc_feature 1..20: note = Target: ANGPTL3; (-) strand; PAM type: NRG; PAM sequence: TGG
  source 1..20: mol_type = other DNA
attgttaagaatatgggtgc

SEQ ID NO: 6984 - DNA, 20 bp, synthetic construct
  misc_feature 1..20: note = Description of Artificial Sequence: Synthetic oligonucleotide
  misc_feature 1..20: note = Target: ANGPTL3; (-) strand; PAM type: NRG; PAM sequence: GGG
  source 1..20: mol_type = other DNA
ggtgaaattgttaagaatat

SEQ ID NO: 6985 - DNA, 20 bp, synthetic construct
  misc_feature 1..20: note = Description of Artificial Sequence: Synthetic oligonucleotide
  misc_feature 1..20: note = Target: ANGPTL3; (-) strand; PAM type: NRG; PAM sequence: TGG
  source 1..20: mol_type = other DNA
tggtgaaattgttaagaata

SEQ ID NO: 6986 - DNA, 20 bp, synthetic construct
  misc_feature 1..20: note = Description of Artificial Sequence: Synthetic oligonucleotide
  misc_feature 1..20: note = Target: ANGPTL3; (-) strand; PAM type: NRG; PAM sequence: AAG
  source 1..20: mol_type = other DNA
attaatatggtgaaattgtt

SEQ ID NO: 6987 - DNA, 20 bp, synthetic construct
  misc_feature 1..20: note = Description of Artificial Sequence: Synthetic oligonucleotide
  misc_feature 1..20: note = Target: ANGPTL3; (-) strand; PAM type: NRG; PAM sequence: TGG
  source 1..20: mol_type = other DNA
ttaatcttgacatattaata

SEQ ID NO: 6988 - DNA, 20 bp, synthetic construct
  misc_feature 1..20: note = Description of Artificial Sequence: Synthetic oligonucleotide
  misc_feature 1..20: note = Target: ANGPTL3; (-) strand; PAM type: NRG; PAM sequence: TAG
  source 1..20: mol_type = other DNA
ttaagaaatttgtgagaaaa

SEQ ID NO: 6989 - DNA, 20 bp, synthetic construct
  misc_feature 1..20: note = Description of Artificial Sequence: Synthetic oligonucleotide
  misc_feature 1..20: note = Target: ANGPTL3; (-) strand; PAM type: NRG; PAM sequence: GAG
  source 1..20: mol_type = other DNA
gttcatattaagaaatttgt

SEQ ID NO: 6990 - DNA, 20 bp, synthetic construct
  misc_feature 1..20: note = Description of Artificial Sequence: Synthetic oligonucleotide
  misc_feature 1..20: note = Target: ANGPTL3; (-) strand; PAM type: NRG; PAM sequence: AAG
  source 1..20: mol_type = other DNA
tcttattgagtgttcatatt

SEQ ID NO: 6991 - DNA, 20 bp, synthetic construct
  misc_feature 1..20: note = Description of Artificial Sequence: Synthetic oligonucleotide
  misc_feature 1..20: note = Target: ANGPTL3; (-) strand; PAM type: NRG; PAM sequence: GAG
  source 1..20: mol_type = other DNA
tattagtgattattcttatt

SEQ ID NO: 6992 - DNA, 20 bp, synthetic construct
  misc_feature 1..20: note = Description of Artificial Sequence: Synthetic oligonucleotide
  misc_feature 1..20: note = Target: ANGPTL3; (-) strand; PAM type: NRG; PAM sequence: TAG
  source 1..20: mol_type = other DNA
aaaatactaaatgcttatat

SEQ ID NO: 6993 - DNA, 20 bp, synthetic construct
  misc_feature 1..20: note = Description of Artificial Sequence: Synthetic oligonucleotide
  misc_feature 1..20: note = Target: ANGPTL3; (-) strand; PAM type: NRG; PAM sequence: TAG
  source 1..20: mol_type = other DNA
gttccactatgcttccaact

SEQ ID NO: 6994 - DNA, 20 bp, synthetic construct
  misc_feature 1..20: note = Description of Artificial Sequence: Synthetic oligonucleotide
  misc_feature 1..20: note = Target: ANGPTL3; (-) strand; PAM type: NRG; PAM sequence: CAG
  source 1..20: mol_type = other DNA
gccgattacaagcgtgagcc

SEQ ID NO: 6995 - DNA, 20 bp, synthetic construct
  misc_feature 1..20: note = Description of Artificial Sequence: Synthetic oligonucleotide
  misc_feature 1..20: note = Target: ANGPTL3; (-) strand; PAM type: NRG; PAM sequence: GAG
  source 1..20: mol_type = other DNA
gcccagccgattacaagcgt

SEQ ID NO: 6996 - DNA, 20 bp, synthetic construct
  misc_feature 1..20: note = Description of Artificial Sequence: Synthetic oligonucleotide
  misc_feature 1..20: note = Target: ANGPTL3; (-) strand; PAM type: NRG; PAM sequence: AAG
  source 1..20: mol_type = other DNA
gcatgagcccagccgattac

SEQ ID NO: 6997 - DNA, 20 bp, synthetic construct
  misc_feature 1..20: note = Description of Artificial Sequence: Synthetic oligonucleotide
  misc_feature 1..20: note = Target: ANGPTL3; (-) strand; PAM type: NRG; PAM sequence: CAG
  source 1..20: mol_type = other DNA
aaaatttacaggcatgagcc

SEQ ID NO: 6998 - DNA, 20 bp, synthetic construct
  misc_feature 1..20: note = Description of Artificial Sequence: Synthetic oligonucleotide
  misc_feature 1..20: note = Target: ANGPTL3; (-) strand; PAM type: NRG; PAM sequence: GAG
  source 1..20: mol_type = other DNA
ctcccaaaatttacaggcat

SEQ ID NO: 6999 - DNA, 20 bp, synthetic construct
  misc_feature 1..20: note = Description of Artificial Sequence: Synthetic oligonucleotide
  misc_feature 1..20: note = Target: ANGPTL3; (-) strand; PAM type: NRG; PAM sequence: AGG
  source 1..20: mol_type = other DNA
cttggcctcccaaaatttac

SEQ ID NO: 7000 - DNA, 20 bp, synthetic construct
  misc_feature 1..20: note = Description of Artificial Sequence: Synthetic oligonucleotide
  misc_feature 1..20: note = Target: ANGPTL3; (-) strand; PAM type: NRG; PAM sequence: CAG
  source 1..20: mol_type = other DNA
ccttggcctcccaaaattta

SEQ ID NO: 7001 - DNA, 20 bp, synthetic construct
  misc_feature 1..20: note = Description of Artificial Sequence: Synthetic oligonucleotide
  misc_feature 1..20: note = Target: ANGPTL3; (-) strand; PAM type: NRG; PAM sequence: TGG
  source 1..20: mol_type = other DNA
ctcaagcaattcttttacct

SEQ ID NO: 7002 - DNA, 20 bp, synthetic construct
  misc_feature 1..20: note = Description of Artificial Sequence: Synthetic oligonucleotide
  misc_feature 1..20: note = Target: ANGPTL3; (-) strand; PAM type: NRG; PAM sequence: AAG
  source 1..20: mol_type = other DNA
ggtctggaaatactgggctc

SEQ ID NO: 7003 - DNA, 20 bp, synthetic construct
  misc_feature 1..20: note = Description of Artificial Sequence: Synthetic oligonucleotide
  misc_feature 1..20: note = Target: ANGPTL3; (-) strand; PAM type: NRG; PAM sequence: GGG
  source 1..20: mol_type = other DNA
catgctggtctggaaatact

SEQ ID NO: 7004 - DNA, 20 bp, synthetic construct
  misc_feature 1..20: note = Description of Artificial Sequence: Synthetic oligonucleotide
  misc_feature 1..20: note = Target: ANGPTL3; (-) strand; PAM type: NRG; PAM sequence: TGG
  source 1..20: mol_type = other DNA
ccatgctggtctggaaatac

SEQ ID NO: 7005 - DNA, 20 bp, synthetic construct
  misc_feature 1..20: note = Description of Artificial Sequence: Synthetic oligonucleotide
  misc_feature 1..20: note = Target: ANGPTL3; (-) strand; PAM type: NRG; PAM sequence: TGG
  source 1..20: mol_type = other DNA
atgtattgcccatgctggtc

SEQ ID NO: 7006 - DNA, 20 bp, synthetic construct
  misc_feature 1..20: note = Description of Artificial Sequence: Synthetic oligonucleotide
  misc_feature 1..20: note = Target: ANGPTL3; (-) strand; PAM type: NRG; PAM sequence: TGG
  source 1..20: mol_type = other DNA
tcttaatgtattgcccatgc

SEQ ID NO: 7007 - DNA, 20 bp, synthetic construct
  misc_feature 1..20: note = Description of Artificial Sequence: Synthetic oligonucleotide
  misc_feature 1..20: note = Target: ANGPTL3; (-) strand; PAM type: NRG; PAM sequence: AAG
  source 1..20: mol_type = other DNA
ttaataacatttttttttta

SEQ ID NO: 7008 - DNA, 20 bp, synthetic construct
  misc_feature 1..20: note = Description of Artificial Sequence: Synthetic oligonucleotide
  misc_feature 1..20: note = Target: ANGPTL3; (-) strand; PAM type: NRG; PAM sequence: GAG
  source 1..20: mol_type = other DNA
tatacatttaacaaaaagag

SEQ ID NO: 7009 - DNA, 20 bp, synthetic construct
  misc_feature 1..20: note = Description of Artificial Sequence: Synthetic oligonucleotide
  misc_feature 1..20: note = Target: ANGPTL3; (-) strand; PAM type: NRG; PAM sequence: AGG
  source 1..20: mol_type = other DNA
aatatacatttaacaaaaag

SEQ ID NO: 7010 - DNA, 20 bp, synthetic construct
  misc_feature 1..20: note = Description of Artificial Sequence: Synthetic oligonucleotide
  misc_feature 1..20: note = Target: ANGPTL3; (-) strand; PAM type: NRG; PAM sequence: GAG
  source 1..20: mol_type = other DNA
taatatacatttaacaaaaa

SEQ ID NO: 7011 - DNA, 20 bp, synthetic construct
  misc_feature 1..20: note = Description of Artificial Sequence: Synthetic oligonucleotide
  misc_feature 1..20: note = Target: ANGPTL3; (-) strand; PAM type: NRG; PAM sequence: AAG
  source 1..20: mol_type = other DNA
gataatatacatttaacaaa

SEQ ID NO: 7012 - DNA, 20 bp, synthetic construct
  misc_feature 1..20: note = Description of Artificial Sequence: Synthetic oligonucleotide
  misc_feature 1..20: note = Target: ANGPTL3; (-) strand; PAM type: NRG; PAM sequence: TAG
  source 1..20: mol_type = other DNA
ttttctgaagtttgttagct

SEQ ID NO: 7013 - DNA, 20 bp, synthetic construct
  misc_feature 1..20: note = Description of Artificial Sequence: Synthetic oligonucleotide
  misc_feature 1..20: note = Target: ANGPTL3; (-) strand; PAM type: NRG; PAM sequence: TAG
  source 1..20: mol_type = other DNA
taagtttttctgaagtttgt

SEQ ID NO: 7014 - DNA, 20 bp, synthetic construct
  misc_feature 1..20: note = Description of Artificial Sequence: Synthetic oligonucleotide
  misc_feature 1..20: note = Target: ANGPTL3; (-) strand; PAM type: NRG; PAM sequence: AAG
  source 1..20: mol_type = other DNA
gcccatcataagtttttctg

SEQ ID NO: 7015 - DNA, 20 bp, synthetic construct
  misc_feature 1..20: note = Description of Artificial Sequence: Synthetic oligonucleotide
  misc_feature 1..20: note = Target: ANGPTL3; (-) strand; PAM type: NRG; PAM sequence: AAG
  source 1..20: mol_type = other DNA
acaagcagcttgcccatcat

SEQ ID NO: 7016 - DNA, 20 bp, synthetic construct
  misc_feature 1..20: note = Description of Artificial Sequence: Synthetic oligonucleotide
  misc_feature 1..20: note = Target: ANGPTL3; (-) strand; PAM type: NRG; PAM sequence: CAG
  source 1..20: mol_type = other DNA
aataccttcaatgtcacaag

SEQ ID NO: 7017 - DNA, 20 bp, synthetic construct
  misc_feature 1..20: note = Description of Artificial Sequence: Synthetic oligonucleotide
  misc_feature 1..20: note = Target: ANGPTL3; (-) strand; PAM type: NRG; PAM sequence: AAG
  source 1..20: mol_type = other DNA
ttaaataccttcaatgtcac

SEQ ID NO: 7018 - DNA, 20 bp, synthetic construct
  misc_feature 1..20: note = Description of Artificial Sequence: Synthetic oligonucleotide
  misc_feature 1..20: note = Target: ANGPTL3; (-) strand; PAM type: NRG; PAM sequence: TAG
  source 1..20: mol_type = other DNA
gtggtcatctaggaccaaac

SEQ ID NO: 7019 - DNA, 20 bp, synthetic construct
  misc_feature 1..20: note = Description of Artificial Sequence: Synthetic oligonucleotide
  misc_feature 1..20: note = Target: ANGPTL3; (-) strand; PAM type: NRG; PAM sequence: AGG
  source 1..20: mol_type = other DNA
caatggatatgtggtcatct

SEQ ID NO: 7020 - DNA, 20 bp, synthetic construct
  misc_feature 1..20: note = Description of Artificial Sequence: Synthetic oligonucleotide
  misc_feature 1..20: note = Target: ANGPTL3; (-) strand; PAM type: NRG; PAM sequence: TAG
  source 1..20: mol_type = other DNA
acaatggatatgtggtcatc

SEQ ID NO: 7021 - DNA, 20 bp, synthetic construct
  misc_feature 1..20: note = Description of Artificial Sequence: Synthetic oligonucleotide
  misc_feature 1..20: note = Target: ANGPTL3; (-) strand; PAM type: NRG; PAM sequence: TGG
  source 1..20: mol_type = other DNA
ttgaaggaacaatggatatg

SEQ ID NO: 7022 - DNA, 20 bp, synthetic construct
  misc_feature 1..20: note = Description of Artificial Sequence: Synthetic oligonucleotide
  misc_feature 1..20: note = Target: ANGPTL3; (-) strand; PAM type: NRG; PAM sequence: TGG
  source 1..20: mol_type = other DNA
tgtgctcgttgaaggaacaa

SEQ ID NO: 7023 - DNA, 20 bp, synthetic construct
  misc_feature 1..20: note = Description of Artificial Sequence: Synthetic oligonucleotide
  misc_feature 1..20: note = Target: ANGPTL3; (-) strand; PAM type: NRG; PAM sequence: AGG
  source 1..20: mol_type = other DNA
ctttaccatgtgctcgttga

SEQ ID NO: 7024 - DNA, 20 bp, synthetic construct
  misc_feature 1..20: note = Description of Artificial Sequence: Synthetic oligonucleotide
  misc_feature 1..20: note = Target: ANGPTL3; (-) strand; PAM type: NRG; PAM sequence: AAG
  source 1..20: mol_type = other DNA
tctttaccatgtgctcgttg

SEQ ID NO: 7025 - DNA, 20 bp, synthetic construct
  misc_feature 1..20: note = Description of Artificial Sequence: Synthetic oligonucleotide
  misc_feature 1..20: note = Target: ANGPTL3; (-) strand; PAM type: NRG; PAM sequence: AGG
  source 1..20: mol_type = other DNA
gttctgtgtctctgtgttct

SEQ ID NO: 7026 - DNA, 20 bp, synthetic construct
  misc_feature 1..20: note = Description of Artificial Sequence: Synthetic oligonucleotide
  misc_feature 1..20: note = Target: ANGPTL3; (-) strand; PAM type: NRG; PAM sequence: TAG
  source 1..20: mol_type = other DNA
tgttctgtgtctctgtgttc

SEQ ID NO: 7027 - DNA, 20 bp, synthetic construct
  misc_feature 1..20: note = Description of Artificial Sequence: Synthetic oligonucleotide
  misc_feature 1..20: note = Target: ANGPTL3; (-) strand; PAM type: NRG; PAM sequence: AAG
  source 1..20: mol_type = other DNA
atatatagtaagtgtcatta

SEQ ID NO: 7028 - DNA, 20 bp, synthetic construct
  misc_feature 1..20: note = Description of Artificial Sequence: Synthetic oligonucleotide
  misc_feature 1..20: note = Target: ANGPTL3; (-) strand; PAM type: NRG; PAM sequence: AAG
  source 1..20: mol_type = other DNA
cacaaaatcccatatatagt

SEQ ID NO: 7029 - DNA, 20 bp, synthetic construct
  misc_feature 1..20: note = Description of Artificial Sequence: Synthetic oligonucleotide
  misc_feature 1..20: note = Target: ANGPTL3; (-) strand; PAM type: NRG; PAM sequence: TAG
  source 1..20: mol_type = other DNA
ttgtcacaaaatcccatata

SEQ ID NO: 7030 - DNA, 20 bp, synthetic construct
  misc_feature 1..20: note = Description of Artificial Sequence: Synthetic oligonucleotide
  misc_feature 1..20: note = Target: ANGPTL3; (-) strand; PAM type: NRG; PAM sequence: TGG
  source 1..20: mol_type = other DNA
ctctcaatgctgtgttcctc

SEQ ID NO: 7031 - DNA, 20 bp, synthetic construct
  misc_feature 1..20: note = Description of Artificial Sequence: Synthetic oligonucleotide
  misc_feature 1..20: note = Target: ANGPTL3; (-) strand; PAM type: NRG; PAM sequence: CGG
  source 1..20: mol_type = other DNA
cactccctcaggtggtgtta

SEQ ID NO: 7032 - DNA, 20 bp, synthetic construct
  misc_feature 1..20: note = Description of Artificial Sequence: Synthetic oligonucleotide
  misc_feature 1..20: note = Target: ANGPTL3; (-) strand; PAM type: NRG; PAM sequence: TGG
  source 1..20: mol_type = other DNA
cctttctccactccctcagg

SEQ ID NO: 7033 - DNA, 20 bp, synthetic construct
  misc_feature 1..20: note = Description of Artificial Sequence: Synthetic oligonucleotide
  misc_feature 1..20: note = Target: ANGPTL3; (-) strand; PAM type: NRG; PAM sequence: AGG
  source 1..20: mol_type = other DNA
aagcctttctccactccctc

SEQ ID NO: 7034 - DNA, 20 bp, synthetic construct
  misc_feature 1..20: note = Description of Artificial Sequence: Synthetic oligonucleotide
  misc_feature 1..20: note = Target: ANGPTL3; (-) strand; PAM type: NRG; PAM sequence: CAG
  source 1..20: mol_type = other DNA
gaagcctttctccactccct

SEQ ID NO: 7035 - DNA, 20 bp, synthetic construct
  misc_feature 1..20: note = Description of Artificial Sequence: Synthetic oligonucleotide
  misc_feature 1..20: note = Target: ANGPTL3; (-) strand; PAM type: NRG; PAM sequence: AAG
  source 1..20: mol_type = other DNA
caaaaaacactttctctctg

SEQ ID NO: 7036 - DNA, 20 bp, synthetic construct
  misc_feature 1..20: note = Description of Artificial Sequence: Synthetic oligonucleotide
  misc_feature 1..20: note = Target: ANGPTL3; (-) strand; PAM type: NRG; PAM sequence: CAG
  source 1..20: mol_type = other DNA
tactttagttcttttggaaa

SEQ ID NO: 7037 - DNA, 20 bp, synthetic construct
  misc_feature 1..20: note = Description of Artificial Sequence: Synthetic oligonucleotide
  misc_feature 1..20: note = Target: ANGPTL3; (-) strand; PAM type: NRG; PAM sequence: TGG
  source 1..20: mol_type = other DNA
aaactgtactttagttcttt

SEQ ID NO: 7038 - DNA, 20 bp, synthetic construct
  misc_feature 1..20: note = Description of Artificial Sequence: Synthetic oligonucleotide
  misc_feature 1..20: note = Target: ANGPTL3; (-) strand; PAM type: NRG; PAM sequence: TAG
  source 1..20: mol_type = other DNA
gcatttctcaaactgtactt

SEQ ID NO: 7039 - DNA, 20 bp, synthetic construct
  misc_feature 1..20: note = Description of Artificial Sequence: Synthetic oligonucleotide
  misc_feature 1..20: note = Target: ANGPTL3; (-) strand; PAM type: NRG; PAM sequence: AAG
  source 1..20: mol_type = other DNA
ggggaaaaaagtaatgaatt

SEQ ID NO: 7040 - DNA, 20 bp, synthetic construct
  misc_feature 1..20: note = Description of Artificial Sequence: Synthetic oligonucleotide
  misc_feature 1..20: note = Target: ANGPTL3; (-) strand; PAM type: NRG; PAM sequence: AAG
  source 1..20: mol_type = other DNA
tattaaagttgaggggaaaa

SEQ ID NO: 7041 - DNA, 20 bp, synthetic construct
  misc_feature 1..20: note = Description of Artificial Sequence: Synthetic oligonucleotide
  misc_feature 1..20: note = Target: ANGPTL3; (-) strand; PAM type: NRG; PAM sequence: GGG
  source 1..20: mol_type = other DNA
aatttattattaaagttgag

SEQ ID NO: 7042 - DNA, 20 bp, synthetic construct
  misc_feature 1..20: note = Description of Artificial Sequence: Synthetic oligonucleotide
  misc_feature 1..20: note = Target: ANGPTL3; (-) strand; PAM type: NRG; PAM sequence: GGG
  source 1..20: mol_type = other DNA
aaatttattattaaagttga

SEQ ID NO: 7043 - DNA, 20 bp, synthetic construct
  misc_feature 1..20: note = Description of Artificial Sequence: Synthetic oligonucleotide
  misc_feature 1..20: note = Target: ANGPTL3; (-) strand; PAM type: NRG; PAM sequence: AGG
  source 1..20: mol_type = other DNA
taaatttattattaaagttg

SEQ ID NO: 7044 - DNA, 20 bp, synthetic construct
  misc_feature 1..20: note = Description of Artificial Sequence: Synthetic oligonucleotide
  misc_feature 1..20: note = Target: ANGPTL3; (-) strand; PAM type: NRG; PAM sequence: GAG
  source 1..20: mol_type = other DNA
gtaaatttattattaaagtt

SEQ ID NO: 7045 - DNA, 20 bp, synthetic construct
  misc_feature 1..20: note = Description of Artificial Sequence: Synthetic oligonucleotide
  misc_feature 1..20: note = Target: ANGPTL3; (-) strand; PAM type: NRG; PAM sequence: AAG
  source 1..20: mol_type = other DNA
gttgggtaaatttattatta

SEQ ID NO: 7046 - DNA, 20 bp, synthetic construct
  misc_feature 1..20: note = Description of Artificial Sequence: Synthetic oligonucleotide
  misc_feature 1..20: note = Target: ANGPTL3; (-) strand; PAM type: NRG; PAM sequence: GGG
  source 1..20: mol_type = other DNA
caaaaataaacttttttgtt

SEQ ID NO: 7047 - DNA, 20 bp, synthetic construct
  misc_feature 1..20: note = Description of Artificial Sequence: Synthetic oligonucleotide
  misc_feature 1..20: note = Target: ANGPTL3; (-) strand; PAM type: NRG; PAM sequence: TGG
  source 1..20: mol_type = other DNA
tcaaaaataaacttttttgt

SEQ ID NO: 7048 - DNA, 20 bp, synthetic construct
  misc_feature 1..20: note = Description of Artificial Sequence: Synthetic oligonucleotide
  misc_feature 1..20: note = Target: ANGPTL3; (-) strand; PAM type: NRG; PAM sequence: AAG
  source 1..20: mol_type = other DNA
tatgattttaagagatttac

SEQ ID NO: 7049 - DNA, 20 bp, synthetic construct
  misc_feature 1..20: note = Description of Artificial Sequence: Synthetic oligonucleotide
  misc_feature 1..20: note = Target: ANGPTL3; (-) strand; PAM type: NRG; PAM sequence: GAG
  source 1..20: mol_type = other DNA
ttacttttttatgattttaa

SEQ ID NO: 7050 - DNA, 20 bp, synthetic construct
  misc_feature 1..20: note = Description of Artificial Sequence: Synthetic oligonucleotide
  misc_feature 1..20: note = Target: ANGPTL3; (-) strand; PAM type: NRG; PAM sequence: AAG
  source 1..20: mol_type = other DNA
ttttacttttttatgatttt

SEQ ID NO: 7051 - DNA, 20 bp, synthetic construct
  misc_feature 1..20: note = Description of Artificial Sequence: Synthetic oligonucleotide
  misc_feature 1..20: note = Target: ANGPTL3; (-) strand; PAM type: NRG; PAM sequence: AAG
  source 1..20: mol_type = other DNA
tggtgactacctgtttttaa

SEQ ID NO: 7052 - DNA, 20 bp, synthetic construct
  misc_feature 1..20: note = Description of Artificial Sequence: Synthetic oligonucleotide
  misc_feature 1..20: note = Target: ANGPTL3; (-) strand; PAM type: NRG; PAM sequence: TGG
  source 1..20: mol_type = other DNA
aaactacacattcaatgcta

SEQ ID NO: 7053 - DNA, 20 bp, synthetic construct
  misc_feature 1..20: note = Description of Artificial Sequence: Synthetic oligonucleotide
  misc_feature 1..20: note = Target: ANGPTL3; (-) strand; PAM type: NRG; PAM sequence: AGG
  source 1..20: mol_type = other DNA
aaatgagcaactaacttaat

SEQ ID NO: 7054 - DNA, 20 bp, synthetic construct
  misc_feature 1..20: note = Description of Artificial Sequence: Synthetic oligonucleotide
  misc_feature 1..20: note = Target: ANGPTL3; (-) strand; PAM type: NRG; PAM sequence: TAG
  source 1..20: mol_type = other DNA
gaaatgagcaactaacttaa

SEQ ID NO: 7055 - DNA, 20 bp, synthetic construct
  misc_feature 1..20: note = Description of Artificial Sequence: Synthetic oligonucleotide
  misc_feature 1..20: note = Target: ANGPTL3; (-) strand; PAM type: NRG; PAM sequence: GAG
  source 1..20: mol_type = other DNA
ctaaatgaaatcaaagaaat

SEQ ID NO: 7056 - DNA, 20 bp, synthetic construct
  misc_feature 1..20: note = Description of Artificial Sequence: Synthetic oligonucleotide
  misc_feature 1..20: note = Target: ANGPTL3; (-) strand; PAM type: NRG; PAM sequence: AAG
  source 1..20: mol_type = other DNA
atcaatgctaaatgaaatca

SEQ ID NO: 7057 - DNA, 20 bp, synthetic construct
  misc_feature 1..20: note = Description of Artificial Sequence: Synthetic oligonucleotide
  misc_feature 1..20: note = Target: ANGPTL3; (-) strand; PAM type: NRG; PAM sequence: TAG
  source 1..20: mol_type = other DNA
aaccttcttccacattgagt

SEQ ID NO: 7058 - DNA, 20 bp, synthetic construct
  misc_feature 1..20: note = Description of Artificial Sequence: Synthetic oligonucleotide
  misc_feature 1..20: note = Target: ANGPTL3; (-) strand; PAM type: NRG; PAM sequence: GAG
  source 1..20: mol_type = other DNA
atgtaaccttcttccacatt

SEQ ID NO: 7059 - DNA, 20 bp, synthetic construct
  misc_feature 1..20: note = Description of Artificial Sequence: Synthetic oligonucleotide
  misc_feature 1..20: note = Target: ANGPTL3; (-) strand; PAM type: NRG; PAM sequence: AAG
  source 1..20: mol_type = other DNA
ggtgaacatagttaatcatt

SEQ ID NO: 7060 - DNA, 20 bp, synthetic construct
  misc_feature 1..20: note = Description of Artificial Sequence: Synthetic oligonucleotide
  misc_feature 1..20: note = Target: ANGPTL3; (-) strand; PAM type: NRG; PAM sequence: TAG
  source 1..20: mol_type = other DNA
gtaaggttggtaggtgaaca

SEQ ID NO: 7061 - DNA, 20 bp, synthetic construct
  misc_feature 1..20: note = Description of Artificial Sequence: Synthetic oligonucleotide
  misc_feature 1..20: note = Target: ANGPTL3; (-) strand; PAM type: NRG; PAM sequence: AGG
  source 1..20: mol_type = other DNA
ccagaaaaggtaaggttggt

SEQ ID NO: 7062 - DNA, 20 bp, synthetic construct
  misc_feature 1..20: note = Description of Artificial Sequence: Synthetic oligonucleotide
  misc_feature 1..20: note = Target: ANGPTL3; (-) strand; PAM type: NRG; PAM sequence: TAG
  source 1..20: mol_type = other DNA
cccagaaaaggtaaggttgg

SEQ ID NO: 7063 - DNA, 20 bp, synthetic construct
  misc_feature 1..20: note = Description of Artificial Sequence: Synthetic oligonucleotide
  misc_feature 1..20: note = Target: ANGPTL3; (-) strand; PAM type: NRG; PAM sequence: TGG
  source 1..20: mol_type = other DNA
ttgcccagaaaaggtaaggt

SEQ ID NO: 7064 - DNA, 20 bp, synthetic construct
  misc_feature 1..20: note = Description of Artificial Sequence: Synthetic oligonucleotide
  misc_feature 1..20: note = Target: ANGPTL3; (-) strand; PAM type: NRG; PAM sequence: AGG
  source 1..20: mol_type = other DNA
atatttgcccagaaaaggta

SEQ ID NO: 7065 - DNA, 20 bp, synthetic construct
  misc_feature 1..20: note = Description of Artificial Sequence: Synthetic oligonucleotide
  misc_feature 1..20: note = Target: ANGPTL3; (-) strand; PAM type: NRG; PAM sequence: AAG
  source 1..20: mol_type = other DNA
aatatttgcccagaaaaggt

SEQ ID NO: 7066 - DNA, 20 bp, synthetic construct
  misc_feature 1..20: note = Description of Artificial Sequence: Synthetic oligonucleotide
  misc_feature 1..20: note = Target: ANGPTL3; (-) strand; PAM type: NRG; PAM sequence: AGG
  source 1..20: mol_type = other DNA
taccaatatttgcccagaaa

SEQ ID NO: 7067 - DNA, 20 bp, synthetic construct
  misc_feature 1..20: note = Description of Artificial Sequence: Synthetic oligonucleotide
  misc_feature 1..20: note = Target: ANGPTL3; (-) strand; PAM type: NRG; PAM sequence: AAG
  source 1..20: mol_type = other DNA
ataccaatatttgcccagaa

SEQ ID NO: 7068 - DNA, 20 bp, synthetic construct
  misc_feature 1..20: note = Description of Artificial Sequence: Synthetic oligonucleotide
  misc_feature 1..20: note = Target: ANGPTL3; (-) strand; PAM type: NRG; PAM sequence: CAG
  source 1..20: mol_type = other DNA
tatatataccaatatttgcc

SEQ ID NO: 7069 - DNA, 20 bp, synthetic construct
  misc_feature 1..20: note = Description of Artificial Sequence: Synthetic oligonucleotide
  misc_feature 1..20: note = Target: ANGPTL3; (-) strand; PAM type: NRG; PAM sequence: TAG
  source 1..20: mol_type = other DNA
ttttcttctggaagcagacc

SEQ ID NO: 7070 - DNA, 20 bp, synthetic construct
  misc_feature 1..20: note = Description of Artificial Sequence: Synthetic oligonucleotide
  misc_feature 1..20: note = Target: ANGPTL3; (-) strand; PAM type: NRG; PAM sequence: CAG
  source 1..20: mol_type = other DNA
gaactgttttcttctggaag

SEQ ID NO: 7071 - DNA, 20 bp, synthetic construct
  misc_feature 1..20: note = Description of Artificial Sequence: Synthetic oligonucleotide
  misc_feature 1..20: note = Target: ANGPTL3; (-) strand; PAM type: NRG; PAM sequence: AAG
  source 1..20: mol_type = other DNA
gtggaactgttttcttctgg

SEQ ID NO: 7072 - DNA, 20 bp, synthetic construct
  misc_feature 1..20: note = Description of Artificial Sequence: Synthetic oligonucleotide
  misc_feature 1..20: note = Target: ANGPTL3; (-) strand; PAM type: NRG; PAM sequence: TGG
  source 1..20: mol_type = other DNA
aacgtggaactgttttcttc

SEQ ID NO: 7073 - DNA, 20 bp, synthetic construct
  misc_feature 1..20: note = Description of Artificial Sequence: Synthetic oligonucleotide
  misc_feature 1..20: note = Target: ANGPTL3; (-) strand; PAM type: NRG; PAM sequence: TGG
  source 1..20: mol_type = other DNA
attttcaatttcaagcaacg

SEQ ID NO: 7074 - DNA, 20 bp, synthetic construct
  misc_feature 1..20: note = Description of Artificial Sequence: Synthetic oligonucleotide
  misc_feature 1..20: note = Target: ANGPTL3; (-) strand; PAM type: NRG; PAM sequence: AAG
  source 1..20: mol_type = other DNA
ttatcttgattttcaatttc

SEQ ID NO: 7075 - DNA, 20 bp, synthetic construct
  misc_feature 1..20: note = Description of Artificial Sequence: Synthetic oligonucleotide
  misc_feature 1..20: note = Target: ANGPTL3; (-) strand; PAM type: NRG; PAM sequence: GAG
  source 1..20: mol_type = other DNA
agaggaacaataaaaagaag

SEQ ID NO: 7076 - DNA, 20 bp, synthetic construct
  misc_feature 1..20: note = Description of Artificial Sequence: Synthetic oligonucleotide
  misc_feature 1..20: note = Target: ANGPTL3; (-) strand; PAM type: NRG; PAM sequence: AGG
  source 1..20: mol_type = other DNA
ctagaggaacaataaaaaga

SEQ ID NO: 7077 - DNA, 20 bp, synthetic construct
  misc_feature 1..20: note = Description of Artificial Sequence: Synthetic oligonucleotide
  misc_feature 1..20: note = Target: ANGPTL3; (-) strand; PAM type: NRG; PAM sequence: AAG
  source 1..20: mol_type = other DNA
actagaggaacaataaaaag

SEQ ID NO: 7078 - DNA, 20 bp, synthetic construct
  misc_feature 1..20: note = Description of Artificial Sequence: Synthetic oligonucleotide
  misc_feature 1..20: note = Target: ANGPTL3; (-) strand; PAM type: NRG; PAM sequence: AAG
  source 1..20: mol_type = other DNA
ataactagaggaacaataaa

SEQ ID NO: 7079 - DNA, 20 bp, synthetic construct
  misc_feature 1..20: note = Description of Artificial Sequence: Synthetic oligonucleotide
  misc_feature 1..20: note = Target: ANGPTL3; (-) strand; PAM type: NRG; PAM sequence: AGG
  source 1..20: mol_type = other DNA
attctggaggaaataactag

SEQ ID NO: 7080 - DNA, 20 bp, synthetic construct
  misc_feature 1..20: note = Description of Artificial Sequence: Synthetic oligonucleotide
  misc_feature 1..20: note = Target: ANGPTL3; (-) strand; PAM type: NRG; PAM sequence: GAG
  source 1..20: mol_type = other DNA
aattctggaggaaataacta

SEQ ID NO: 7081 - DNA, 20 bp, synthetic construct
  misc_feature 1..20: note = Description of Artificial Sequence: Synthetic oligonucleotide
  misc_feature 1..20: note = Target: ANGPTL3; (-) strand; PAM type: NRG; PAM sequence: TAG
  source 1..20: mol_type = other DNA
tcaattctggaggaaataac

SEQ ID NO: 7082 - DNA, 20 bp, synthetic construct
  misc_feature 1..20: note = Description of Artificial Sequence: Synthetic oligonucleotide
  misc_feature 1..20: note = Target: ANGPTL3; (-) strand; PAM type: NRG; PAM sequence: AGG
  source 1..20: mol_type = other DNA
attgtcttgatcaattctgg

SEQ ID NO: 7083 - DNA, 20 bp, synthetic construct
  misc_feature 1..20: note = Description of Artificial Sequence: Synthetic oligonucleotide
  misc_feature 1..20: note = Target: ANGPTL3; (-) strand; PAM type: NRG; PAM sequence: GAG
  source 1..20: mol_type = other DNA
aattgtcttgatcaattctg

SEQ ID NO: 7084 - DNA, 20 bp, synthetic construct
  misc_feature 1..20: note = Description of Artificial Sequence: Synthetic oligonucleotide
  misc_feature 1..20: note = Target: ANGPTL3; (-) strand; PAM type: NRG; PAM sequence: TGG
  source 1..20: mol_type = other DNA
tgaattgtcttgatcaattc

SEQ ID NO: 7085 - DNA, 20 bp, synthetic construct
  misc_feature 1..20: note = Description of Artificial Sequence: Synthetic oligonucleotide
  misc_feature 1..20: note = Target: ANGPTL3; (-) strand; PAM type: NRG; PAM sequence: GAG
  source 1..20: mol_type = other DNA
tgattttggctctggagata

SEQ ID NO: 7086 - DNA, 20 bp, synthetic construct
  misc_feature 1..20: note = Description of Artificial Sequence: Synthetic oligonucleotide
  misc_feature 1..20: note = Target: ANGPTL3; (-) strand; PAM type: NRG; PAM sequence: TAG
  source 1..20: mol_type = other DNA
cttgattttggctctggaga

SEQ ID NO: 7087 - DNA, 20 bp, synthetic construct
  misc_feature 1..20: note = Description of Artificial Sequence: Synthetic oligonucleotide
  misc_feature 1..20: note = Target: ANGPTL3; (-) strand; PAM type: NRG; PAM sequence: GAG
  source 1..20: mol_type = other DNA
aaatcttgattttggctctg

SEQ ID NO: 7088 - DNA, 20 bp, synthetic construct
  misc_feature 1..20: note = Description of Artificial Sequence: Synthetic oligonucleotide
  misc_feature 1..20: note = Target: ANGPTL3; (-) strand; PAM type: NRG; PAM sequence: TGG
  source 1..20: mol_type = other DNA
gcaaatcttgattttggctc

SEQ ID NO: 7089 - DNA, 20 bp, synthetic construct
  misc_feature 1..20: note = Description of Artificial Sequence: Synthetic oligonucleotide
  misc_feature 1..20: note = Target: ANGPTL3; (-) strand; PAM type: NRG; PAM sequence: TGG
  source 1..20: mol_type = other DNA
aacatagcaaatcttgattt

SEQ ID NO: 7090 - DNA, 20 bp, synthetic construct
  misc_feature 1..20: note = Description of Artificial Sequence: Synthetic oligonucleotide
  misc_feature 1..20: note = Target: ANGPTL3; (-) strand; PAM type: NRG; PAM sequence: TAG
  source 1..20: mol_type = other DNA
aatttttacatcgtctaaca

SEQ ID NO: 7091 - DNA, 20 bp, synthetic construct
  misc_feature 1..20: note = Description of Artificial Sequence: Synthetic oligonucleotide
  misc_feature 1..20: note = Target: ANGPTL3; (-) strand; PAM type: NRG; PAM sequence: TGG
  source 1..20: mol_type = other DNA
tcccaactgaaggaggccat

SEQ ID NO: 7092 - DNA, 20 bp, synthetic construct
  misc_feature 1..20: note = Description of Artificial Sequence: Synthetic oligonucleotide
  misc_feature 1..20: note = Target: ANGPTL3; (-) strand; PAM type: NRG; PAM sequence: AGG
  source 1..20: mol_type = other DNA
gaccatgtcccaactgaagg

SEQ ID NO: 7093 - DNA, 20 bp, synthetic construct
  misc_feature 1..20: note = Description of Artificial Sequence: Synthetic oligonucleotide
  misc_feature 1..20: note = Target: ANGPTL3; (-) strand; PAM type: NRG; PAM sequence: GAG
  source 1..20: mol_type = other DNA
agaccatgtcccaactgaag

SEQ ID NO: 7094 - DNA, 20 bp, synthetic construct
  misc_feature 1..20: note = Description of Artificial Sequence: Synthetic oligonucleotide
  misc_feature 1..20: note = Target: ANGPTL3; (-) strand; PAM type: NRG; PAM sequence: AGG
  source 1..20: mol_type = other DNA
taagaccatgtcccaactga

SEQ ID NO: 7095 - DNA, 20 bp, synthetic construct
  misc_feature 1..20: note = Description of Artificial Sequence: Synthetic oligonucleotide
  misc_feature 1..20: note = Target: ANGPTL3; (-) strand; PAM type: NRG; PAM sequence: AAG
  source 1..20: mol_type = other DNA
ttaagaccatgtcccaactg

SEQ ID NO: 7096 - DNA, 20 bp, synthetic construct
  misc_feature 1..20: note = Description of Artificial Sequence: Synthetic oligonucleotide
  misc_feature 1..20: note = Target: ANGPTL3; (-) strand; PAM type: NRG; PAM sequence: AAG
  source 1..20: mol_type = other DNA
gtcttatggacaaagtcttt

SEQ ID NO: 7097 - DNA, 20 bp, synthetic construct
  misc_feature 1..20: note = Description of Artificial Sequence: Synthetic oligonucleotide
  misc_feature 1..20: note = Target: ANGPTL3; (-) strand; PAM type: NRG; PAM sequence: AAG
  source 1..20: mol_type = other DNA
ggcccttcgtcttatggaca

SEQ ID NO: 7098 - DNA, 20 bp, synthetic construct
  misc_feature 1..20: note = Description of Artificial Sequence: Synthetic oligonucleotide
  misc_feature 1..20: note = Target: ANGPTL3; (-) strand; PAM type: NRG; PAM sequence: TGG
  source 1..20: mol_type = other DNA
taatttggcccttcgtctta

SEQ ID NO: 7099 - DNA, 20 bp, synthetic construct
  misc_feature 1..20: note = Description of Artificial Sequence: Synthetic oligonucleotide
  misc_feature 1..20: note = Target: ANGPTL3; (-) strand; PAM type: NRG; PAM sequence: TGG
  source 1..20: mol_type = other DNA
tttgaaatatgtcattaatt

SEQ ID NO: 7100 - DNA, 20 bp, synthetic construct
  misc_feature 1..20: note = Description of Artificial Sequence: Synthetic oligonucleotide
  misc_feature 1..20: note = Target: ANGPTL3; (-) strand; PAM type: NRG; PAM sequence: GAG
  source 1..20: mol_type = other DNA
aaagactgatcaaatatgtt

SEQ ID NO: 7101 - DNA, 20 bp, synthetic construct
  misc_feature 1..20: note = Description of Artificial Sequence: Synthetic oligonucleotide
  misc_feature 1..20: note = Target: ANGPTL3; (-) strand; PAM type: NRG; PAM sequence: AAG
  source 1..20: mol_type = other DNA
ttgcagcgatagatcataaa

SEQ ID NO: 7102 - DNA, 20 bp, synthetic construct
  misc_feature 1..20: note = Description of Artificial Sequence: Synthetic oligonucleotide
  misc_feature 1..20: note = Target: ANGPTL3; (-) strand; PAM type: NRG; PAM sequence: TAG
  source 1..20: mol_type = other DNA
atttcactggtttgcagcga

SEQ ID NO: 7103 - DNA, 20 bp, synthetic construct
  misc_feature 1..20: note = Description of Artificial Sequence: Synthetic oligonucleotide
  misc_feature 1..20: note = Target: ANGPTL3; (-) strand; PAM type: NRG; PAM sequence: CAG
  source 1..20: mol_type = other DNA
tctttgatttcactggtttg

SEQ ID NO: 7104 - DNA, 20 bp, synthetic construct
  misc_feature 1..20: note = Description of Artificial Sequence: Synthetic oligonucleotide
  misc_feature 1..20: note = Target: ANGPTL3; (-) strand; PAM type: NRG; PAM sequence: TGG
  source 1..20: mol_type = other DNA
ttcttcttctttgatttcac

SEQ ID NO: 7105 - DNA, 20 bp, synthetic construct
  misc_feature 1..20: note = Description of Artificial Sequence: Synthetic oligonucleotide
  misc_feature 1..20: note = Target: ANGPTL3; (-) strand; PAM type: NRG; PAM sequence: CAG
  source 1..20: mol_type = other DNA
agtttatatgtagttcttct

SEQ ID NO: 7106 - DNA, 20 bp, synthetic construct
  misc_feature 1..20: note = Description of Artificial Sequence: Synthetic oligonucleotide
  misc_feature 1..20: note = Target: ANGPTL3; (-) strand; PAM type: NRG; PAM sequence: TAG
  source 1..20: mol_type = other DNA
tttgacttgtagtttatatg

SEQ ID NO: 7107 - DNA, 20 bp, synthetic construct
  misc_feature 1..20: note = Description of Artificial Sequence: Synthetic oligonucleotide
  misc_feature 1..20: note = Target: ANGPTL3; (-) strand; PAM type: NRG; PAM sequence: TAG
  source 1..20: mol_type = other DNA
acctcttcatttttgacttg

SEQ ID NO: 7108 - DNA, 20 bp, synthetic construct
  misc_feature 1..20: note = Description of Artificial Sequence: Synthetic oligonucleotide
  misc_feature 1..20: note = Target: ANGPTL3; (-) strand; PAM type: NRG; PAM sequence: AAG
  source 1..20: mol_type = other DNA
tcaagttttgagttgagttc

SEQ ID NO: 7109 - DNA, 20 bp, synthetic construct
  misc_feature 1..20: note = Description of Artificial Sequence: Synthetic oligonucleotide
  misc_feature 1..20: note = Target: ANGPTL3; (-) strand; PAM type: NRG; PAM sequence: GAG
  source 1..20: mol_type = other DNA
aggctttcaagttttgagtt

SEQ ID NO: 7110 - DNA, 20 bp, synthetic construct
  misc_feature 1..20: note = Description of Artificial Sequence: Synthetic oligonucleotide
  misc_feature 1..20: note = Target: ANGPTL3; (-) strand; PAM type: NRG; PAM sequence: GAG
  source 1..20: mol_type = other DNA
ctaggaggctttcaagtttt

SEQ ID NO: 7111 - DNA, 20 bp, synthetic construct
  misc_feature 1..20: note = Description of Artificial Sequence: Synthetic oligonucleotide
  misc_feature 1..20: note = Target: ANGPTL3; (-) strand; PAM type: NRG; PAM sequence: AAG
  source 1..20: mol_type = other DNA
ttttcttctaggaggctttc

SEQ ID NO: 7112 - DNA, 20 bp, synthetic construct
  misc_feature 1..20: note = Description of Artificial Sequence: Synthetic oligonucleotide
  misc_feature 1..20: note = Target: ANGPTL3; (-) strand; PAM type: NRG; PAM sequence: AGG
  source 1..20: mol_type = other DNA
gtagaattttttcttctagg

SEQ ID NO: 7113 - DNA, 20 bp, synthetic construct
  misc_feature 1..20: note = Description of Artificial Sequence: Synthetic oligonucleotide
  misc_feature 1..20: note = Target: ANGPTL3; (-) strand; PAM type: NRG; PAM sequence: GAG
  source 1..20: mol_type = other DNA
agtagaattttttcttctag

SEQ ID NO: 7114 - DNA, 20 bp, synthetic construct
  misc_feature 1..20: note = Description of Artificial Sequence: Synthetic oligonucleotide
  misc_feature 1..20: note = Target: ANGPTL3; (-) strand; PAM type: NRG; PAM sequence: AGG
  source 1..20: mol_type = other DNA
gaagtagaattttttcttct

SEQ ID NO: 7115 - DNA, 20 bp, synthetic construct
  misc_feature 1..20: note = Description of Artificial Sequence: Synthetic oligonucleotide
  misc_feature 1..20: note = Target: ANGPTL3; (-) strand; PAM type: NRG; PAM sequence: TAG
  source 1..20: mol_type = other DNA
tgaagtagaattttttcttc

SEQ ID NO: 7116 - DNA, 20 bp, synthetic construct
  misc_feature 1..20: note = Description of Artificial Sequence: Synthetic oligonucleotide
  misc_feature 1..20: note = Target: ANGPTL3; (-) strand; PAM type: NRG; PAM sequence: TAG
  source 1..20: mol_type = other DNA
tatttcactttttgttgaag

SEQ ID NO: 7117 - DNA, 20 bp, synthetic construct
  misc_feature 1..20: note = Description of Artificial Sequence: Synthetic oligonucleotide
  misc_feature 1..20: note = Target: ANGPTL3; (-) strand; PAM type: NRG; PAM sequence: AAG
  source 1..20: mol_type = other DNA
aaatatttcactttttgttg

SEQ ID NO: 7118 - DNA, 20 bp, synthetic construct
  misc_feature 1..20: note = Description of Artificial Sequence: Synthetic oligonucleotide
  misc_feature 1..20: note = Target: ANGPTL3; (-) strand; PAM type: NRG; PAM sequence: TAG
  source 1..20: mol_type = other DNA
tgattttgaattaagttagt

SEQ ID NO: 7119 - DNA, 20 bp, synthetic construct
  misc_feature 1..20: note = Description of Artificial Sequence: Synthetic oligonucleotide
  misc_feature 1..20: note = Target: ANGPTL3; (-) strand; PAM type: NRG; PAM sequence: TAG
  source 1..20: mol_type = other DNA
aggttgattttgaattaagt

SEQ ID NO: 7120 - DNA, 20 bp, synthetic construct
  misc_feature 1..20: note = Description of Artificial Sequence: Synthetic oligonucleotide
  misc_feature 1..20: note = Target: ANGPTL3; (-) strand; PAM type: NRG; PAM sequence: AAG
  source 1..20: mol_type = other DNA
tttcaggttgattttgaatt

SEQ ID NO: 7121 - DNA, 20 bp, synthetic construct
  misc_feature 1..20: note = Description of Artificial Sequence: Synthetic oligonucleotide
  misc_feature 1..20: note = Target: ANGPTL3; (-) strand; PAM type: NRG; PAM sequence: AGG
  source 1..20: mol_type = other DNA
tctgggtgttctggagtttc

SEQ ID NO: 7122 - DNA, 20 bp, synthetic construct
  misc_feature 1..20: note = Description of Artificial Sequence: Synthetic oligonucleotide
  misc_feature 1..20: note = Target: ANGPTL3; (-) strand; PAM type: NRG; PAM sequence: CAG
  source 1..20: mol_type = other DNA
ttctgggtgttctggagttt

SEQ ID NO: 7123 - DNA, 20 bp, synthetic construct
  misc_feature 1..20: note = Description of Artificial Sequence: Synthetic oligonucleotide
  misc_feature 1..20: note = Target: ANGPTL3; (-) strand; PAM type: NRG; PAM sequence: GAG
  source 1..20: mol_type = other DNA
agttacttctgggtgttctg

SEQ ID NO: 7124 - DNA, 20 bp, synthetic construct
  misc_feature 1..20: note = Description of Artificial Sequence: Synthetic oligonucleotide
  misc_feature 1..20: note = Target: ANGPTL3; (-) strand; PAM type: NRG; PAM sequence: TGG
  source 1..20: mol_type = other DNA
gaagttacttctgggtgttc

SEQ ID NO: 7125 - DNA, 20 bp, synthetic construct
  misc_feature 1..20: note = Description of Artificial Sequence: Synthetic oligonucleotide
  misc_feature 1..20: note = Target: ANGPTL3; (-) strand; PAM type: NRG; PAM sequence: GGG
  source 1..20: mol_type = other DNA
ctttaagtgaagttacttct

SEQ ID NO: 7126 - DNA, 20 bp, synthetic construct
  misc_feature 1..20: note = Description of Artificial Sequence: Synthetic oligonucleotide
  misc_feature 1..20: note = Target: ANGPTL3; (-) strand; PAM type: NRG; PAM sequence: TGG
  source 1..20: mol_type = other DNA
actttaagtgaagttacttc

SEQ ID NO: 7127 - DNA, 20 bp, synthetic construct
  misc_feature 1..20: note = Description of Artificial Sequence: Synthetic oligonucleotide
  misc_feature 1..20: note = Target: ANGPTL3; (-) strand; PAM type: NRG; PAM sequence: AAG
  source 1..20: mol_type = other DNA
ttttctacttactttaagtg

SEQ ID NO: 7128 - DNA, 20 bp, synthetic construct
  misc_feature 1..20: note = Description of Artificial Sequence: Synthetic oligonucleotide
  misc_feature 1..20: note = Target: ANGPTL3; (-) strand; PAM type: NRG; PAM sequence: AAG
  source 1..20: mol_type = other DNA
ctttattttctacttacttt

SEQ ID NO: 7129 - DNA, 20 bp, synthetic construct
  misc_feature 1..20: note = Description of Artificial Sequence: Synthetic oligonucleotide
  misc_feature 1..20: note = Target: ANGPTL3; (-) strand; PAM type: NRG; PAM sequence: AAG
  source 1..20: mol_type = other DNA
cttagaaatattttttttaa

SEQ ID NO: 7130 - DNA, 20 bp, synthetic construct
  misc_feature 1..20: note = Description of Artificial Sequence: Synthetic oligonucleotide
  misc_feature 1..20: note = Target: ANGPTL3; (-) strand; PAM type: NRG; PAM sequence: TAG
  source 1..20: mol_type = other DNA
gtatttcaaatggcatgcct

SEQ ID NO: 7131 - DNA, 20 bp, synthetic construct
  misc_feature 1..20: note = Description of Artificial Sequence: Synthetic oligonucleotide
  misc_feature 1..20: note = Target: ANGPTL3; (-) strand; PAM type: NRG; PAM sequence: TGG
  source 1..20: mol_type = other DNA
atgcaacaaagtatttcaaa

SEQ ID NO: 7132 - DNA, 20 bp, synthetic construct
  misc_feature 1..20: note = Description of Artificial Sequence: Synthetic oligonucleotide
  misc_feature 1..20: note = Target: ANGPTL3; (-) strand; PAM type: NRG; PAM sequence: AAG
  source 1..20: mol_type = other DNA
agtatttcaacaatgcaaca

SEQ ID NO: 7133 - DNA, 20 bp, synthetic construct
  misc_feature 1..20: note = Description of Artificial Sequence: Synthetic oligonucleotide
  misc_feature 1..20: note = Target: ANGPTL3; (-) strand; PAM type: NRG; PAM sequence: AAG
  source 1..20: mol_type = other DNA
attatttttcttggaaaaaa

SEQ ID NO: 7134 - DNA, 20 bp, synthetic construct
  misc_feature 1..20: note = Description of Artificial Sequence: Synthetic oligonucleotide
  misc_feature 1..20: note = Target: ANGPTL3; (-) strand; PAM type: NRG; PAM sequence: TGG
  source 1..20: mol_type = other DNA
tttctggagattatttttct

SEQ ID NO: 7135 - DNA, 20 bp, synthetic construct
  misc_feature 1..20: note = Description of Artificial Sequence: Synthetic oligonucleotide
  misc_feature 1..20: note = Target: ANGPTL3; (-) strand; PAM type: NRG; PAM sequence: GAG
  source 1..20: mol_type = other DNA
ataggaaattttattttctg

SEQ ID NO: 7136 - DNA, 20 bp, synthetic construct
  misc_feature 1..20: note = Description of Artificial Sequence: Synthetic oligonucleotide
  misc_feature 1..20: note = Target: ANGPTL3; (-) strand; PAM type: NRG; PAM sequence: TGG
  source 1..20: mol_type = other DNA
taataggaaattttattttc

SEQ ID NO: 7137 - DNA, 20 bp, synthetic construct
  misc_feature 1..20: note = Description of Artificial Sequence: Synthetic oligonucleotide
  misc_feature 1..20: note = Target: ANGPTL3; (-) strand; PAM type: NRG; PAM sequence: AGG
  source 1..20: mol_type = other DNA
aactaacttgaaattataat

SEQ ID NO: 7138 - DNA, 20 bp, synthetic construct
  misc_feature 1..20: note = Description of Artificial Sequence: Synthetic oligonucleotide
  misc_feature 1..20: note = Target: ANGPTL3; (-) strand; PAM type: NRG; PAM sequence: TAG
  source 1..20: mol_type = other DNA
aaactaacttgaaattataa

SEQ ID NO: 7139 - DNA, 20 bp, synthetic construct
  misc_feature 1..20: note = Description of Artificial Sequence: Synthetic oligonucleotide
  misc_feature 1..20: note = Target: ANGPTL3; (-) strand; PAM type: NRG; PAM sequence: GGG
  source 1..20: mol_type = other DNA
tgttttcatatataacatta

SEQ ID NO: 7140 - DNA, 20 bp, synthetic construct
  misc_feature 1..20: note = Description of Artificial Sequence: Synthetic oligonucleotide
  misc_feature 1..20: note = Target: ANGPTL3; (-) strand; PAM type: NRG; PAM sequence: AGG
  source 1..20: mol_type = other DNA
gtgttttcatatataacatt

SEQ ID NO: 7141 - DNA, 20 bp, synthetic construct
  misc_feature 1..20: note = Description of Artificial Sequence: Synthetic oligonucleotide
  misc_feature 1..20: note = Target: ANGPTL3; (-) strand; PAM type: NRG; PAM sequence: TAG
  source 1..20: mol_type = other DNA
agtgttttcatatataacat

SEQ ID NO: 7142 - DNA, 20 bp, synthetic construct
  misc_feature 1..20: note = Description of Artificial Sequence: Synthetic oligonucleotide
  misc_feature 1..20: note = Target: ANGPTL3; (-) strand; PAM type: NRG; PAM sequence: CAG
  source 1..20: mol_type = other DNA
tcatataaaatgcaaatttt

SEQ ID NO: 7143 - DNA, 20 bp, synthetic construct
  misc_feature 1..20: note = Description of Artificial Sequence: Synthetic oligonucleotide
  misc_feature 1..20: note = Target: ANGPTL3; (-) strand; PAM type: NRG; PAM sequence: TAG
  source 1..20: mol_type = other DNA
agtgtaatgacatagtgttc

SEQ ID NO: 7144 - DNA, 20 bp, synthetic construct
  misc_feature 1..20: note = Description of Artificial Sequence: Synthetic oligonucleotide
  misc_feature 1..20: note = Target: ANGPTL3; (-) strand; PAM type: NRG; PAM sequence: TAG
  source 1..20: mol_type = other DNA
tttacaatagtgtaatgaca

SEQ ID NO: 7145 - DNA, 20 bp, synthetic construct
  misc_feature 1..20: note = Description of Artificial Sequence: Synthetic oligonucleotide
  misc_feature 1..20: note = Target: ANGPTL3; (-) strand; PAM type: NRG; PAM sequence: TAG
  source 1..20: mol_type = other DNA
ttaccttcagtaatttacaa

SEQ ID NO: 7146 - DNA, 20 bp, synthetic construct
  misc_feature 1..20: note = Description of Artificial Sequence: Synthetic oligonucleotide
  misc_feature 1..20: note = Target: ANGPTL3; (-) strand; PAM type: NRG; PAM sequence: CAG
  source 1..20: mol_type = other DNA
tttaactttttacttacctt

SEQ ID NO: 7147 - DNA, 20 bp, synthetic construct
  misc_feature 1..20: note = Description of Artificial Sequence: Synthetic oligonucleotide
  misc_feature 1..20: note = Target: ANGPTL3; (-) strand; PAM type: NRG; PAM sequence: TAG
  source 1..20: mol_type = other DNA
ctgttttaaacactggagaa

SEQ ID NO: 7148 - DNA, 20 bp, synthetic construct
  misc_feature 1..20: note = Description of Artificial Sequence: Synthetic oligonucleotide
  misc_feature 1..20: note = Target: ANGPTL3; (-) strand; PAM type: NRG; PAM sequence: GAG
  source 1..20: mol_type = other DNA
ttaatctgttttaaacactg

SEQ ID NO: 7149 - DNA, 20 bp, synthetic construct
  misc_feature 1..20: note = Description of Artificial Sequence: Synthetic oligonucleotide
  misc_feature 1..20: note = Target: ANGPTL3; (-) strand; PAM type: NRG; PAM sequence: TGG
  source 1..20: mol_type = other DNA
atttaatctgttttaaacac

SEQ ID NO: 7150 - DNA, 20 bp, synthetic construct
  misc_feature 1..20: note = Description of Artificial Sequence: Synthetic oligonucleotide
  misc_feature 1..20: note = Target: ANGPTL3; (-) strand; PAM type: NRG; PAM sequence: CAG
  source 1..20: mol_type = other DNA
ttcaattaaaagaaaaagcc

SEQ ID NO: 7151 - DNA, 20 bp, synthetic construct
  misc_feature 1..20: note = Description of Artificial Sequence: Synthetic oligonucleotide
  misc_feature 1..20: note = Target: ANGPTL3; (-) strand; PAM type: NRG; PAM sequence: AAG
  source 1..20: mol_type = other DNA
tgaacttcaattaaaagaaa

SEQ ID NO: 7152 - DNA, 20 bp, synthetic construct
  misc_feature 1..20: note = Description of Artificial Sequence: Synthetic oligonucleotide
  misc_feature 1..20: note = Target: ANGPTL3; (-) strand; PAM type: NRG; PAM sequence: AAG
  source 1..20: mol_type = other DNA
attttctgaacttcaattaa

SEQ ID NO: 7153 - DNA, 20 bp, synthetic construct
  misc_feature 1..20: note = Description of Artificial Sequence: Synthetic oligonucleotide
  misc_feature 1..20: note = Target: ANGPTL3; (-) strand; PAM type: NRG; PAM sequence: TAG
  source 1..20: mol_type = other DNA
ccttgtatgcttctttcaaa

SEQ ID NO: 7154 - DNA, 20 bp, synthetic construct
  misc_feature 1..20: note = Description of Artificial Sequence: Synthetic oligonucleotide
  misc_feature 1..20: note = Target: ANGPTL3; (-) strand; PAM type: NRG; PAM sequence: TGG
  source 1..20: mol_type = other DNA
tggatttgaaaaatgaatat

SEQ ID NO: 7155 - DNA, 20 bp, synthetic construct
  misc_feature 1..20: note = Description of Artificial Sequence: Synthetic oligonucleotide
  misc_feature 1..20: note = Target: ANGPTL3; (-) strand; PAM type: NRG; PAM sequence: TGG
  source 1..20: mol_type = other DNA
ctaaatttttaaactaataa

SEQ ID NO: 7156 - DNA, 20 bp, synthetic construct
  misc_feature 1..20: note = Description of Artificial Sequence: Synthetic oligonucleotide
  misc_feature 1..20: note = Target: ANGPTL3; (-) strand; PAM type: NRG; PAM sequence: AAG
  source 1..20: mol_type = other DNA
atagagagtaggttggttat

SEQ ID NO: 7157 - DNA, 20 bp, synthetic construct
  misc_feature 1..20: note = Description of Artificial Sequence: Synthetic oligonucleotide
  misc_feature 1..20: note = Target: ANGPTL3; (-) strand; PAM type: NRG; PAM sequence: TGG
  source 1..20: mol_type = other DNA
tctggatatagagagtaggt

SEQ ID NO: 7158 - DNA, 20 bp, synthetic construct
  misc_feature 1..20: note = Description of Artificial Sequence: Synthetic oligonucleotide
  misc_feature 1..20: note = Target: ANGPTL3; (-) strand; PAM type: NRG; PAM sequence: AGG
  source 1..20: mol_type = other DNA
aaagtctggatatagagagt

SEQ ID NO: 7159 - DNA, 20 bp, synthetic construct
  misc_feature 1..20: note = Description of Artificial Sequence: Synthetic oligonucleotide
  misc_feature 1..20: note = Target: ANGPTL3; (-) strand; PAM type: NRG; PAM sequence: TAG
  source 1..20: mol_type = other DNA
aaaagtctggatatagagag

SEQ ID NO: 7160 - DNA, 20 bp, synthetic construct
  misc_feature 1..20: note = Description of Artificial Sequence: Synthetic oligonucleotide
  misc_feature 1..20: note = Target: ANGPTL3; (-) strand; PAM type: NRG; PAM sequence: GAG
  source 1..20: mol_type = other DNA
tacaaaagtctggatataga

SEQ ID NO: 7161 - DNA, 20 bp, synthetic construct
  misc_feature 1..20: note = Description of Artificial Sequence: Synthetic oligonucleotide
  misc_feature 1..20: note = Target: ANGPTL3; (-) strand; PAM type: NRG; PAM sequence: GAG
  source 1..20: mol_type = other DNA
tctacaaaagtctggatata

SEQ ID NO: 7162 - DNA, 20 bp, synthetic construct
  misc_feature 1..20: note = Description of Artificial Sequence: Synthetic oligonucleotide
  misc_feature 1..20: note = Target: ANGPTL3; (-) strand; PAM type: NRG; PAM sequence: TAG
  source 1..20: mol_type = other DNA
tttctacaaaagtctggata

SEQ ID NO: 7163 - DNA, 20 bp, synthetic construct
  misc_feature 1..20: note = Description of Artificial Sequence: Synthetic oligonucleotide
  misc_feature 1..20: note = Target: ANGPTL3; (-) strand; PAM type: NRG; PAM sequence: TGG
  source 1..20: mol_type = other DNA
cttgtttttctacaaaagtc

SEQ ID NO: 7164 - DNA, 20 bp, synthetic construct
  misc_feature 1..20: note = Description of Artificial Sequence: Synthetic oligonucleotide
  misc_feature 1..20: note = Target: ANGPTL3; (-) strand; PAM type: NRG; PAM sequence: AAG
  source 1..20: mol_type = other DNA
attatcttgtttttctacaa

SEQ ID NO: 7165 - DNA, 20 bp, synthetic construct
  misc_feature 1..20: note = Description of Artificial Sequence: Synthetic oligonucleotide
  misc_feature 1..20: note = Target: ANGPTL3; (-) strand; PAM type: NRG; PAM sequence: AGG
  source 1..20: mol_type = other DNA
ggtcttccacggtctggaga

SEQ ID NO: 7166 - DNA, 20 bp, synthetic construct
  misc_feature 1..20: note = Description of Artificial Sequence: Synthetic oligonucleotide
  misc_feature 1..20: note = Target: ANGPTL3; (-) strand; PAM type: NRG; PAM sequence: AAG
  source 1..20: mol_type = other DNA
tggtcttccacggtctggag

SEQ ID NO: 7167 - DNA, 20 bp, synthetic construct
  misc_feature 1..20: note = Description of Artificial Sequence: Synthetic oligonucleotide
  misc_feature 1..20: note = Target: ANGPTL3; (-) strand; PAM type: NRG; PAM sequence: GAG
  source 1..20: mol_type = other DNA
tattggtcttccacggtctg

SEQ ID NO: 7168 - DNA, 20 bp, synthetic construct
  misc_feature 1..20: note = Description of Artificial Sequence: Synthetic oligonucleotide
  misc_feature 1..20: note = Target: ANGPTL3; (-) strand; PAM type: NRG; PAM sequence: TGG
  source 1..20: mol_type = other DNA
tatattggtcttccacggtc

SEQ ID NO: 7169 - DNA, 20 bp, synthetic construct
  misc_feature 1..20: note = Description of Artificial Sequence: Synthetic oligonucleotide
  misc_feature 1..20: note = Target: ANGPTL3; (-) strand; PAM type: NRG; PAM sequence: CGG
  source 1..20: mol_type = other DNA
ttgtttatattggtcttcca

SEQ ID NO: 7170 - DNA, 20 bp, synthetic construct
  misc_feature 1..20: note = Description of Artificial Sequence: Synthetic oligonucleotide
  misc_feature 1..20: note = Target: ANGPTL3; (-) strand; PAM type: NRG; PAM sequence: TGG
  source 1..20: mol_type = other DNA
gttggtttaattgtttatat

SEQ ID NO: 7171 - DNA, 20 bp, synthetic construct
  misc_feature 1..20: note = Description of Artificial Sequence: Synthetic oligonucleotide
  misc_feature 1..20: note = Target: ANGPTL3; (-) strand; PAM type: NRG; PAM sequence: TGG
  source 1..20: mol_type = other DNA
cttttatttgactatgctgt

SEQ ID NO: 7172 - DNA, 20 bp, synthetic construct
  misc_feature 1..20: note = Description of Artificial Sequence: Synthetic oligonucleotide
  misc_feature 1..20: note = Target: ANGPTL3; (-) strand; PAM type: NRG; PAM sequence: GGG
  source 1..20: mol_type = other DNA
tacagacctgtgtgaaagat

SEQ ID NO: 7173 - DNA, 20 bp, synthetic construct
  misc_feature 1..20: note = Description of Artificial Sequence: Synthetic oligonucleotide
  misc_feature 1..20: note = Target: ANGPTL3; (-) strand; PAM type: NRG; PAM sequence: TGG
  source 1..20: mol_type = other DNA
ttacagacctgtgtgaaaga

SEQ ID NO: 7174 - DNA, 20 bp, synthetic construct
  misc_feature 1..20: note = Description of Artificial Sequence: Synthetic oligonucleotide
  misc_feature 1..20: note = Target: ANGPTL3; (-) strand; PAM type: NRG; PAM sequence: AAG
  source 1..20: mol_type = other DNA
gtttttacagacctgtgtga

SEQ ID NO: 7175 - DNA, 20 bp, synthetic construct
  misc_feature 1..20: note = Description of Artificial Sequence: Synthetic oligonucleotide
  misc_feature 1..20: note = Target: ANGPTL3; (-) strand; PAM type: NRG; PAM sequence: CAG
  source 1..20: mol_type = other DNA
tttaggattcagtgttttta

SEQ ID NO: 7176 - DNA, 20 bp, synthetic construct
  misc_feature 1..20: note = Description of Artificial Sequence: Synthetic oligonucleotide
  misc_feature 1..20: note = Target: ANGPTL3; (-) strand; PAM type: NRG; PAM sequence: CAG
  source 1..20: mol_type = other DNA
ttgtaaataattttaggatt

SEQ ID NO: 7177 - DNA, 20 bp, synthetic construct
  misc_feature 1..20: note = Description of Artificial Sequence: Synthetic oligonucleotide
  misc_feature 1..20: note = Target: ANGPTL3; (-) strand; PAM type: NRG; PAM sequence: AGG
  source 1..20: mol_type = other DNA
taaagcttgtaaataatttt

SEQ ID NO: 7178 - DNA, 20 bp, synthetic construct
  misc_feature 1..20: note = Description of Artificial Sequence: Synthetic oligonucleotide
  misc_feature 1..20: note = Target: ANGPTL3; (-) strand; PAM type: NRG; PAM sequence: TAG
  source 1..20: mol_type = other DNA
ttaaagcttgtaaataattt

SEQ ID NO: 7179 - DNA, 20 bp, synthetic construct
  misc_feature 1..20: note = Description of Artificial Sequence: Synthetic oligonucleotide
  misc_feature 1..20: note = Target: ANGPTL3; (-) strand; PAM type: NRG; PAM sequence: AAG
  source 1..20: mol_type = other DNA
ttttactcatgatccagtta

SEQ ID NO: 7180 - DNA, 20 bp, synthetic construct
  misc_feature 1..20: note = Description of Artificial Sequence: Synthetic oligonucleotide
  misc_feature 1..20: note = Target: ANGPTL3; (-) strand; PAM type: NRG; PAM sequence: CAG
  source 1..20: mol_type = other DNA
tgataattttactcatgatc

SEQ ID NO: 7181 - DNA, 20 bp, synthetic construct
  misc_feature 1..20: note = Description of Artificial Sequence: Synthetic oligonucleotide
  misc_feature 1..20: note = Target: ANGPTL3; (-) strand; PAM type: NRG; PAM sequence: CAG
  source 1..20: mol_type = other DNA
ttcagagcctgcaattttaa

SEQ ID NO: 7182 - DNA, 20 bp, synthetic construct
  misc_feature 1..20: note = Description of Artificial Sequence: Synthetic oligonucleotide
  misc_feature 1..20: note = Target: ANGPTL3; (-) strand; PAM type: NRG; PAM sequence: GAG
  source 1..20: mol_type = other DNA
caggtagtttattagcttca

SEQ ID NO: 7183 - DNA, 20 bp, synthetic construct
  misc_feature 1..20: note = Description of Artificial Sequence: Synthetic oligonucleotide
  misc_feature 1..20: note = Target: ANGPTL3; (-) strand; PAM type: NRG; PAM sequence: CAG
  source 1..20: mol_type = other DNA
tgcaggtagtttattagctt

SEQ ID NO: 7184 - DNA, 20 bp, synthetic construct
  misc_feature 1..20: note = Description of Artificial Sequence: Synthetic oligonucleotide
  misc_feature 1..20: note = Target: ANGPTL3; (-) strand; PAM type: NRG; PAM sequence: TAG
  source 1..20: mol_type = other DNA
tttaaatgcaggtagtttat

SEQ ID NO: 7185 - DNA, 20 bp, synthetic construct
  misc_feature 1..20: note = Description of Artificial Sequence: Synthetic oligonucleotide
  misc_feature 1..20: note = Target: ANGPTL3; (-) strand; PAM type: NRG; PAM sequence: TAG
  source 1..20: mol_type = other DNA
agccatggtttaaatgcagg

SEQ ID NO: 7186 - DNA, 20 bp, synthetic construct
  misc_feature 1..20: note = Description of Artificial Sequence: Synthetic oligonucleotide
  misc_feature 1..20: note = Target: ANGPTL3; (-) strand; PAM type: NRG; PAM sequence: AGG
  source 1..20: mol_type = other DNA
tagagccatggtttaaatgc

SEQ ID NO: 7187 - DNA, 20 bp, synthetic construct
  misc_feature 1..20: note = Description of Artificial Sequence: Synthetic oligonucleotide
  misc_feature 1..20: note = Target: ANGPTL3; (-) strand; PAM type: NRG; PAM sequence: CAG
  source 1..20: mol_type = other DNA
ttagagccatggtttaaatg

SEQ ID NO: 7188 - DNA, 20 bp, synthetic construct
  misc_feature 1..20: note = Description of Artificial Sequence: Synthetic oligonucleotide
  misc_feature 1..20: note = Target: ANGPTL3; (-) strand; PAM type: NRG; PAM sequence: TGG
  source 1..20: mol_type = other DNA
cacacaaagttttagagcca

SEQ ID NO: 7189 - DNA, 20 bp, synthetic construct
  misc_feature 1..20: note = Description of Artificial Sequence: Synthetic oligonucleotide
  misc_feature 1..20: note = Target: ANGPTL3; (-) strand; PAM type: NRG; PAM sequence: GAG
  source 1..20: mol_type = other DNA
caaggtcacacaaagtttta

SEQ ID NO: 7190 - DNA, 20 bp, synthetic construct
  misc_feature 1..20: note = Description of Artificial Sequence: Synthetic oligonucleotide
  misc_feature 1..20: note = Target: ANGPTL3; (-) strand; PAM type: NRG; PAM sequence: TAG
  source 1..20: mol_type = other DNA
ttcaaggtcacacaaagttt

SEQ ID NO: 7191 - DNA, 20 bp, synthetic construct
  misc_feature 1..20: note = Description of Artificial Sequence: Synthetic oligonucleotide
  misc_feature 1..20: note = Target: ANGPTL3; (-) strand; PAM type: NRG; PAM sequence: AAG
  source 1..20: mol_type = other DNA
aatttattcaaggtcacaca

SEQ ID NO: 7192 - DNA, 20 bp, synthetic construct
  misc_feature 1..20: note = Description of Artificial Sequence: Synthetic oligonucleotide
  misc_feature 1..20: note = Target: ANGPTL3; (-) strand; PAM type: NRG; PAM sequence: AGG
  source 1..20: mol_type = other DNA
ggggtgaagtaatttattca

SEQ ID NO: 7193 - DNA, 20 bp, synthetic construct
  misc_feature 1..20: note = Description of Artificial Sequence: Synthetic oligonucleotide
  misc_feature 1..20: note = Target: ANGPTL3; (-) strand; PAM type: NRG; PAM sequence: AAG
  source 1..20: mol_type = other DNA
aggggtgaagtaatttattc

SEQ ID NO: 7194 - DNA, 20 bp, synthetic construct
  misc_feature 1..20: note = Description of Artificial Sequence: Synthetic oligonucleotide
  misc_feature 1..20: note = Target: ANGPTL3; (-) strand; PAM type: NRG; PAM sequence: AAG
  source 1..20: mol_type = other DNA
aactgagagataaaggggtg

SEQ ID NO: 7195 - DNA, 20 bp, synthetic construct
  misc_feature 1..20: note = Description of Artificial Sequence: Synthetic oligonucleotide
  misc_feature 1..20: note = Target: ANGPTL3; (-) strand; PAM type: NRG; PAM sequence: GGG
  source 1..20: mol_type = other DNA
gaggaaactgagagataaag

SEQ ID NO: 7196 - DNA, 20 bp, synthetic construct
  misc_feature 1..20: note = Description of Artificial Sequence: Synthetic oligonucleotide
  misc_feature 1..20: note = Target: ANGPTL3; (-) strand; PAM type: NRG; PAM sequence: GGG
  source 1..20: mol_type = other DNA
tgaggaaactgagagataaa

SEQ ID NO: 7197 - DNA, 20 bp, synthetic construct
  misc_feature 1..20: note = Description of Artificial Sequence: Synthetic oligonucleotide
  misc_feature 1..20: note = Target: ANGPTL3; (-) strand; PAM type: NRG; PAM sequence: AGG
  source 1..20: mol_type = other DNA
gtgaggaaactgagagataa

SEQ ID NO: 7198 - DNA, 20 bp, synthetic construct
  misc_feature 1..20: note = Description of Artificial Sequence: Synthetic oligonucleotide
  misc_feature 1..20: note = Target: ANGPTL3; (-) strand; PAM type: NRG; PAM sequence: AAG
  source 1..20: mol_type = other DNA
tgtgaggaaactgagagata

SEQ ID NO: 7199 - DNA, 20 bp, synthetic construct
  misc_feature 1..20: note = Description of Artificial Sequence: Synthetic oligonucleotide
  misc_feature 1..20: note = Target: ANGPTL3; (-) strand; PAM type: NRG; PAM sequence: GAG
  source 1..20: mol_type = other DNA
agtatatgtgaggaaactga

SEQ ID NO: 7200 - DNA, 20 bp, synthetic construct
  misc_feature 1..20: note = Description of Artificial Sequence: Synthetic oligonucleotide
  misc_feature 1..20: note = Target: ANGPTL3; (-) strand; PAM type: NRG; PAM sequence: GAG
  source 1..20: mol_type = other DNA
gtagtatatgtgaggaaact

SEQ ID NO: 7201 - DNA, 20 bp, synthetic construct
  misc_feature 1..20: note = Description of Artificial Sequence: Synthetic oligonucleotide
  misc_feature 1..20: note = Target: ANGPTL3; (-) strand; PAM type: NRG; PAM sequence: AGG
  source 1..20: mol_type = other DNA
ttatctttgtagtatatgtg

SEQ ID NO: 7202 - DNA, 20 bp, synthetic construct
  misc_feature 1..20: note = Description of Artificial Sequence: Synthetic oligonucleotide
  misc_feature 1..20: note = Target: ANGPTL3; (-) strand; PAM type: NRG; PAM sequence: GAG
  source 1..20: mol_type = other DNA
attatctttgtagtatatgt

SEQ ID NO: 7203 - DNA, 20 bp, synthetic construct
  misc_feature 1..20: note = Description of Artificial Sequence: Synthetic oligonucleotide
  misc_feature 1..20: note = Target: ANGPTL3; (-) strand; PAM type: NRG; PAM sequence: TAG
  source 1..20: mol_type = other DNA
aagttctgttattatctttg

SEQ ID NO: 7204 - DNA, 20 bp, synthetic construct
  misc_feature 1..20: note = Description of Artificial Sequence: Synthetic oligonucleotide
  misc_feature 1..20: note = Target: ANGPTL3; (-) strand; PAM type: NRG; PAM sequence: AAG
  source 1..20: mol_type = other DNA
ttttcttacaataatcctat

SEQ ID NO: 7205 - DNA, 20 bp, synthetic construct
  misc_feature 1..20: note = Description of Artificial Sequence: Synthetic oligonucleotide
  misc_feature 1..20: note = Target: ANGPTL3; (-) strand; PAM type: NRG; PAM sequence: TGG
  source 1..20: mol_type = other DNA
gaattttagtaagatgacat

SEQ ID NO: 7206 - DNA, 20 bp, synthetic construct
  misc_feature 1..20: note = Description of Artificial Sequence: Synthetic oligonucleotide
  misc_feature 1..20: note = Target: ANGPTL3; (-) strand; PAM type: NRG; PAM sequence: AAG
  source 1..20: mol_type = other DNA
gatctaatttgaattttagt

SEQ ID NO: 7207 - DNA, 20 bp, synthetic construct
  misc_feature 1..20: note = Description of Artificial Sequence: Synthetic oligonucleotide
  misc_feature 1..20: note = Target: ANGPTL3; (-) strand; PAM type: NRG; PAM sequence: TAG
  source 1..20: mol_type = other DNA
acatgatctaatttgaattt

SEQ ID NO: 7208 - DNA, 20 bp, synthetic construct
  misc_feature 1..20: note = Description of Artificial Sequence: Synthetic oligonucleotide
  misc_feature 1..20: note = Target: ANGPTL3; (-) strand; PAM type: NRG; PAM sequence: GAG
  source 1..20: mol_type = other DNA
attgtgtggttttgagcaaa

SEQ ID NO: 7209 - DNA, 20 bp, synthetic construct
  misc_feature 1..20: note = Description of Artificial Sequence: Synthetic oligonucleotide
  misc_feature 1..20: note = Target: ANGPTL3; (-) strand; PAM type: NRG; PAM sequence: AAG
  source 1..20: mol_type = other DNA
ctattgtgtggttttgagca

SEQ ID NO: 7210 - DNA, 20 bp, synthetic construct
  misc_feature 1..20: note = Description of Artificial Sequence: Synthetic oligonucleotide
  misc_feature 1..20: note = Target: ANGPTL3; (-) strand; PAM type: NRG; PAM sequence: GAG
  source 1..20: mol_type = other DNA
gaaagctattgtgtggtttt

SEQ ID NO: 7211 - DNA, 20 bp, synthetic construct
  misc_feature 1..20: note = Description of Artificial Sequence: Synthetic oligonucleotide
  misc_feature 1..20: note = Target: ANGPTL3; (-) strand; PAM type: NRG; PAM sequence: TGG
  source 1..20: mol_type = other DNA
tgaaatggaaagctattgtg

SEQ ID NO: 7212 - DNA, 20 bp, synthetic construct
  misc_feature 1..20: note = Description of Artificial Sequence: Synthetic oligonucleotide
  misc_feature 1..20: note = Target: ANGPTL3; (-) strand; PAM type: NRG; PAM sequence: AAG
  source 1..20: mol_type = other DNA
gccaatatgagtgaaatgga

SEQ ID NO: 7213 - DNA, 20 bp, synthetic construct
  misc_feature 1..20: note = Description of Artificial Sequence: Synthetic oligonucleotide
  misc_feature 1..20: note = Target: ANGPTL3; (-) strand; PAM type: NRG; PAM sequence: TGG
  source 1..20: mol_type = other DNA
aagagccaatatgagtgaaa

SEQ ID NO: 7214 - DNA, 20 bp, synthetic construct
  misc_feature 1..20: note = Description of Artificial Sequence: Synthetic oligonucleotide
  misc_feature 1..20: note = Target: ANGPTL3; (-) strand; PAM type: NRG; PAM sequence: GAG
  source 1..20: mol_type = other DNA
ttggtctaaagagccaatat

SEQ ID NO: 7215 - DNA, 20 bp, synthetic construct
  misc_feature 1..20: note = Description of Artificial Sequence: Synthetic oligonucleotide
  misc_feature 1..20: note = Target: ANGPTL3; (-) strand; PAM type: NRG; PAM sequence: GAG
  source 1..20: mol_type = other DNA
ttgggtaatcttggtctaaa

SEQ ID NO: 7216 - DNA, 20 bp, synthetic construct
  misc_feature 1..20: note = Description of Artificial Sequence: Synthetic oligonucleotide
  misc_feature 1..20: note = Target: ANGPTL3; (-) strand; PAM type: NRG; PAM sequence: AAG
  source 1..20: mol_type = other DNA
ggttgggtaatcttggtcta

SEQ ID NO: 7217 - DNA, 20 bp, synthetic construct
  misc_feature 1..20: note = Description of Artificial Sequence: Synthetic oligonucleotide
  misc_feature 1..20: note = Target: ANGPTL3; (-) strand; PAM type: NRG; PAM sequence: TGG
  source 1..20: mol_type = other DNA
gacgaagggttgggtaatct

SEQ ID NO: 7218 - DNA, 20 bp, synthetic construct
  misc_feature 1..20: note = Description of Artificial Sequence: Synthetic oligonucleotide
  misc_feature 1..20: note = Target: ANGPTL3; (-) strand; PAM type: NRG; PAM sequence: GGG
  source 1..20: mol_type = other DNA
cagtgagatgacgaagggtt

SEQ ID NO: 7219 - DNA, 20 bp, synthetic construct
  misc_feature 1..20: note = Description of Artificial Sequence: Synthetic oligonucleotide
  misc_feature 1..20: note = Target: ANGPTL3; (-) strand; PAM type: NRG; PAM sequence: TGG
  source 1..20: mol_type = other DNA
tcagtgagatgacgaagggt

SEQ ID NO: 7220 - DNA, 20 bp, synthetic construct
  misc_feature 1..20: note = Description of Artificial Sequence: Synthetic oligonucleotide
  misc_feature 1..20: note = Target: ANGPTL3; (-) strand; PAM type: NRG; PAM sequence: GGG
  source 1..20: mol_type = other DNA
gaagtcagtgagatgacgaa

SEQ ID NO: 7221 - DNA, 20 bp, synthetic construct
  misc_feature 1..20: note = Description of Artificial Sequence: Synthetic oligonucleotide
  misc_feature 1..20: note = Target: ANGPTL3; (-) strand; PAM type: NRG; PAM sequence: AGG
  source 1..20: mol_type = other DNA
tgaagtcagtgagatgacga

SEQ ID NO: 7222 - DNA, 20 bp, synthetic construct
  misc_feature 1..20: note = Description of Artificial Sequence: Synthetic oligonucleotide
  misc_feature 1..20: note = Target: ANGPTL3; (-) strand; PAM type: NRG; PAM sequence: AAG
  source 1..20: mol_type = other DNA
gtgaagtcagtgagatgacg

SEQ ID NO: 7223 - DNA, 20 bp, synthetic construct
  misc_feature 1..20: note = Description of Artificial Sequence: Synthetic oligonucleotide
  misc_feature 1..20: note = Target: ANGPTL3; (-) strand; PAM type: NRG; PAM sequence: GAG
  source 1..20: mol_type = other DNA
gtagaggaggtgaagtcagt

SEQ ID NO: 7224 - DNA, 20 bp, synthetic construct
  misc_feature 1..20: note = Description of Artificial Sequence: Synthetic oligonucleotide
  misc_feature 1..20: note = Target: ANGPTL3; (-) strand; PAM type: NRG; PAM sequence: CAG
  source 1..20: mol_type = other DNA
tagagtagaggaggtgaagt

SEQ ID NO: 7225 - DNA, 20 bp, synthetic construct
  misc_feature 1..20: note = Description of Artificial Sequence: Synthetic oligonucleotide
  misc_feature 1..20: note = Target: ANGPTL3; (-) strand; PAM type: NRG; PAM sequence: AAG
  source 1..20: mol_type = other DNA
taactagagtagaggaggtg

SEQ ID NO: 7226 - DNA, 20 bp, synthetic construct
  misc_feature 1..20: note = Description of Artificial Sequence: Synthetic oligonucleotide
  misc_feature 1..20: note = Target: ANGPTL3; (-) strand; PAM type: NRG; PAM sequence: AGG
  source 1..20: mol_type = other DNA
cagaataactagagtagagg

SEQ ID NO: 7227 - DNA, 20 bp, synthetic construct
  misc_feature 1..20: note = Description of Artificial Sequence: Synthetic oligonucleotide
  misc_feature 1..20: note = Target: ANGPTL3; (-) strand; PAM type: NRG; PAM sequence: GAG
  source 1..20: mol_type = other DNA
tcagaataactagagtagag

SEQ ID NO: 7228 - DNA, 20 bp, synthetic construct
  misc_feature 1..20: note = Description of Artificial Sequence: Synthetic oligonucleotide
  misc_feature 1..20: note = Target: ANGPTL3; (-) strand; PAM type: NRG; PAM sequence: AGG
  source 1..20: mol_type = other DNA
ggtcagaataactagagtag

SEQ ID NO: 7229 - DNA, 20 bp, synthetic construct
  misc_feature 1..20: note = Description of Artificial Sequence: Synthetic oligonucleotide
  misc_feature 1..20: note = Target: ANGPTL3; (-) strand; PAM type: NRG; PAM sequence: GAG
  source 1..20: mol_type = other DNA
cggtcagaataactagagta

SEQ ID NO: 7230 - DNA, 20 bp, synthetic construct
  misc_feature 1..20: note = Description of Artificial Sequence: Synthetic oligonucleotide
  misc_feature 1..20: note = Target: ANGPTL3; (-) strand; PAM type: NRG; PAM sequence: TAG
  source 1..20: mol_type = other DNA
agcggtcagaataactagag

SEQ ID NO: 7231 - DNA, 20 bp, synthetic construct
  misc_feature 1..20: note = Description of Artificial Sequence: Synthetic oligonucleotide
  misc_feature 1..20: note = Target: ANGPTL3; (-) strand; PAM type: NRG; PAM sequence: GAG
  source 1..20: mol_type = other DNA
taaagcggtcagaataacta

SEQ ID NO: 7232 - DNA, 20 bp, synthetic construct
  misc_feature 1..20: note = Description of Artificial Sequence: Synthetic oligonucleotide
  misc_feature 1..20: note = Target: ANGPTL3; (-) strand; PAM type: NRG; PAM sequence: TAG
  source 1..20: mol_type = other DNA
ggtaaagcggtcagaataac

SEQ ID NO: 7233 - DNA, 20 bp, synthetic construct
  misc_feature 1..20: note = Description of Artificial Sequence: Synthetic oligonucleotide
  misc_feature 1..20: note = Target: ANGPTL3; (-) strand; PAM type: NRG; PAM sequence: CAG
  source 1..20: mol_type = other DNA
ttgaatactggtaaagcggt

SEQ ID NO: 7234 - DNA, 20 bp, synthetic construct
  misc_feature 1..20: note = Description of Artificial Sequence: Synthetic oligonucleotide
  misc_feature 1..20: note = Target: ANGPTL3; (-) strand; PAM type: NRG; PAM sequence: CGG
  source 1..20: mol_type = other DNA
gtgtttgaatactggtaaag

SEQ ID NO: 7235 - DNA, 20 bp, synthetic construct
  misc_feature 1..20: note = Description of Artificial Sequence: Synthetic oligonucleotide
  misc_feature 1..20: note = Target: ANGPTL3; (-) strand; PAM type: NRG; PAM sequence: AAG
  source 1..20: mol_type = other DNA
gatgtgtttgaatactggta

SEQ ID NO: 7236 - DNA, 20 bp, synthetic construct
  misc_feature 1..20: note = Description of Artificial Sequence: Synthetic oligonucleotide
  misc_feature 1..20: note = Target: ANGPTL3; (-) strand; PAM type: NRG; PAM sequence: TGG
  source 1..20: mol_type = other DNA
tgtttgatgtgtttgaatac

SEQ ID NO: 7237 - DNA, 20 bp, synthetic construct
  misc_feature 1..20: note = Description of Artificial Sequence: Synthetic oligonucleotide
  misc_feature 1..20: note = Target: ANGPTL3; (-) strand; PAM type: NRG; PAM sequence: CAG
  source 1..20: mol_type = other DNA
gggcaaaggctttgaggtgg

SEQ ID NO: 7238 - DNA, 20 bp, synthetic construct
  misc_feature 1..20: note = Description of Artificial Sequence: Synthetic oligonucleotide
  misc_feature 1..20: note = Target: ANGPTL3; (-) strand; PAM type: NRG; PAM sequence: TGG
  source 1..20: mol_type = other DNA
caagggcaaaggctttgagg

SEQ ID NO: 7239 - DNA, 20 bp, synthetic construct
  misc_feature 1..20: note = Description of Artificial Sequence: Synthetic oligonucleotide
  misc_feature 1..20: note = Target: ANGPTL3; (-) strand; PAM type: NRG; PAM sequence: AGG
  source 1..20: mol_type = other DNA
caacaagggcaaaggctttg

SEQ ID NO: 7240 - DNA, 20 bp, synthetic construct
  misc_feature 1..20: note = Description of Artificial Sequence: Synthetic oligonucleotide
  misc_feature 1..20: note = Target: ANGPTL3; (-) strand; PAM type: NRG; PAM sequence: GAG
  source 1..20: mol_type = other DNA
acaacaagggcaaaggcttt

SEQ ID NO: 7241 - DNA, 20 bp, synthetic construct
  misc_feature 1..20: note = Description of Artificial Sequence: Synthetic oligonucleotide
  misc_feature 1..20: note = Target: ANGPTL3; (-) strand; PAM type: NRG; PAM sequence: AGG
  source 1..20: mol_type = other DNA
agaggaaacaacaagggcaa

SEQ ID NO: 7242 - DNA, 20 bp, synthetic construct
  misc_feature 1..20: note = Description of Artificial Sequence: Synthetic oligonucleotide
  misc_feature 1..20: note = Target: ANGPTL3; (-) strand; PAM type: NRG; PAM sequence: AAG
  source 1..20: mol_type = other DNA
tagaggaaacaacaagggca

SEQ ID NO: 7243 - DNA, 20 bp, synthetic construct
  misc_feature 1..20: note = Description of Artificial Sequence: Synthetic oligonucleotide
  misc_feature 1..20: note = Target: ANGPTL3; (-) strand; PAM type: NRG; PAM sequence: GGG
  source 1..20: mol_type = other DNA
ccagttagaggaaacaacaa

SEQ ID NO: 7244 - DNA, 20 bp, synthetic construct
  misc_feature 1..20: note = Description of Artificial Sequence: Synthetic oligonucleotide
  misc_feature 1..20: note = Target: ANGPTL3; (-) strand; PAM type: NRG; PAM sequence: AGG
  source 1..20: mol_type = other DNA
tccagttagaggaaacaaca

SEQ ID NO: 7245 - DNA, 20 bp, synthetic construct
  misc_feature 1..20: note = Description of Artificial Sequence: Synthetic oligonucleotide
  misc_feature 1..20: note = Target: ANGPTL3; (-) strand; PAM type: NRG; PAM sequence: AAG
  source 1..20: mol_type = other DNA
ttccagttagaggaaacaac

SEQ ID NO: 7246 - DNA, 20 bp, synthetic construct
  misc_feature 1..20: note = Description of Artificial Sequence: Synthetic oligonucleotide
  misc_feature 1..20: note = Target: ANGPTL3; (-) strand; PAM type: NRG; PAM sequence: AGG
  source 1..20: mol_type = other DNA
cagaagagcgttccagttag

SEQ ID NO: 7247 - DNA, 20 bp, synthetic construct
  misc_feature 1..20: note = Description of Artificial Sequence: Synthetic oligonucleotide
  misc_feature 1..20: note = Target: ANGPTL3; (-) strand; PAM type: NRG; PAM sequence: GAG
  source 1..20: mol_type = other DNA
gcagaagagcgttccagtta

SEQ ID NO: 7248 - DNA, 20 bp, synthetic construct
  misc_feature 1..20: note = Description of Artificial Sequence: Synthetic oligonucleotide
  misc_feature 1..20: note = Target: ANGPTL3; (-) strand; PAM type: NRG; PAM sequence: TAG
  source 1..20: mol_type = other DNA
gggcagaagagcgttccagt

SEQ ID NO: 7249 - DNA, 20 bp, synthetic construct
  misc_feature 1..20: note = Description of Artificial Sequence: Synthetic oligonucleotide
  misc_feature 1..20: note = Target: ANGPTL3; (-) strand; PAM type: NRG; PAM sequence: CAG
  source 1..20: mol_type = other DNA
accagggcagaagagcgttc

SEQ ID NO: 7250 - DNA, 20 bp, synthetic construct
  misc_feature 1..20: note = Description of Artificial Sequence: Synthetic oligonucleotide
  misc_feature 1..20: note = Target: ANGPTL3; (-) strand; PAM type: NRG; PAM sequence: GAG
  source 1..20: mol_type = other DNA
acgtagataccagggcagaa

SEQ ID NO: 7251 - DNA, 20 bp, synthetic construct
  misc_feature 1..20: note = Description of Artificial Sequence: Synthetic oligonucleotide
  misc_feature 1..20: note = Target: ANGPTL3; (-) strand; PAM type: NRG; PAM sequence: AAG
  source 1..20: mol_type = other DNA
ccacgtagataccagggcag

SEQ ID NO: 7252 - DNA, 20 bp, synthetic construct
  misc_feature 1..20: note = Description of Artificial Sequence: Synthetic oligonucleotide
  misc_feature 1..20: note = Target: ANGPTL3; (-) strand; PAM type: NRG; PAM sequence: CAG
  source 1..20: mol_type = other DNA
gggccacgtagataccaggg

SEQ ID NO: 7253 - DNA, 20 bp, synthetic construct
  misc_feature 1..20: note = Description of Artificial Sequence: Synthetic oligonucleotide
  misc_feature 1..20: note = Target: ANGPTL3; (-) strand; PAM type: NRG; PAM sequence: GGG
  source 1..20: mol_type = other DNA
agtgggccacgtagatacca

SEQ ID NO: 7254 - DNA, 20 bp, synthetic construct
  misc_feature 1..20: note = Description of Artificial Sequence: Synthetic oligonucleotide
  misc_feature 1..20: note = Target: ANGPTL3; (-) strand; PAM type: NRG; PAM sequence: AGG
  source 1..20: mol_type = other DNA
gagtgggccacgtagatacc

SEQ ID NO: 7255 - DNA, 20 bp, synthetic construct
  misc_feature 1..20: note = Description of Artificial Sequence: Synthetic oligonucleotide
  misc_feature 1..20: note = Target: ANGPTL3; (-) strand; PAM type: NRG; PAM sequence: CAG
  source 1..20: mol_type = other DNA
agagtgggccacgtagatac

SEQ ID NO: 7256 - DNA, 20 bp, synthetic construct
  misc_feature 1..20: note = Description of Artificial Sequence: Synthetic oligonucleotide
  misc_feature 1..20: note = Target: ANGPTL3; (-) strand; PAM type: NRG; PAM sequence: TAG
  source 1..20: mol_type = other DNA
aaatcagagagtgggccacg

SEQ ID NO: 7257 - DNA, 20 bp, synthetic construct
  misc_feature 1..20: note = Description of Artificial Sequence: Synthetic oligonucleotide
  misc_feature 1..20: note = Target: ANGPTL3; (-) strand; PAM type: NRG; PAM sequence: GGG
  source 1..20: mol_type = other DNA
cctaagggaaatcagagagt

SEQ ID NO: 7258 - DNA, 20 bp, synthetic construct
  misc_feature 1..20: note = Description of Artificial Sequence: Synthetic oligonucleotide
  misc_feature 1..20: note = Target: ANGPTL3; (-) strand; PAM type: NRG; PAM sequence: TGG
  source 1..20: mol_type = other DNA
ccctaagggaaatcagagag

SEQ ID NO: 7259 - DNA, 20 bp, synthetic construct
  misc_feature 1..20: note = Description of Artificial Sequence: Synthetic oligonucleotide
  misc_feature 1..20: note = Target: ANGPTL3; (-) strand; PAM type: NRG; PAM sequence: GAG
  source 1..20: mol_type = other DNA
cgaccctaagggaaatcaga

SEQ ID NO: 7260 - DNA, 20 bp, synthetic construct
  misc_feature 1..20: note = Description of Artificial Sequence: Synthetic oligonucleotide
  misc_feature 1..20: note = Target: ANGPTL3; (-) strand; PAM type: NRG; PAM sequence: GAG
  source 1..20: mol_type = other DNA
aacgaccctaagggaaatca

SEQ ID NO: 7261 - DNA, 20 bp, synthetic construct
  misc_feature 1..20: note = Description of Artificial Sequence: Synthetic oligonucleotide
  misc_feature 1..20: note = Target: ANGPTL3; (-) strand; PAM type: NRG; PAM sequence: CAG
  source 1..20: mol_type = other DNA
ataacgaccctaagggaaat

SEQ ID NO: 7262 - DNA, 20 bp, synthetic construct
  misc_feature 1..20: note = Description of Artificial Sequence: Synthetic oligonucleotide
  misc_feature 1..20: note = Target: ANGPTL3; (-) strand; PAM type: NRG; PAM sequence: GGG
  source 1..20: mol_type = other DNA
ttgtttgataacgaccctaa

SEQ ID NO: 7263 - DNA, 20 bp, synthetic construct
  misc_feature 1..20: note = Description of Artificial Sequence: Synthetic oligonucleotide
  misc_feature 1..20: note = Target: ANGPTL3; (-) strand; PAM type: NRG; PAM sequence: AGG
  source 1..20: mol_type = other DNA
tttgtttgataacgacccta

SEQ ID NO: 7264 - DNA, 20 bp, synthetic construct
  misc_feature 1..20: note = Description of Artificial Sequence: Synthetic oligonucleotide
  misc_feature 1..20: note = Target: ANGPTL3; (-) strand; PAM type: NRG; PAM sequence: AAG
  source 1..20: mol_type = other DNA
ttttgtttgataacgaccct

SEQ ID NO: 7265 - DNA, 20 bp, synthetic construct
  misc_feature 1..20: note = Description of Artificial Sequence: Synthetic oligonucleotide
  misc_feature 1..20: note = Target: ANGPTL3; (-) strand; PAM type: NRG; PAM sequence: GGG
  source 1..20: mol_type = other DNA
tgaccttgtaagtcttcatt

SEQ ID NO: 7266 - DNA, 20 bp, synthetic construct
  misc_feature 1..20: note = Description of Artificial Sequence: Synthetic oligonucleotide
  misc_feature 1..20: note = Target: ANGPTL3; (-) strand; PAM type: NRG; PAM sequence: TGG
  source 1..20: mol_type = other DNA
gtgaccttgtaagtcttcat

SEQ ID NO: 7267 - DNA, 20 bp, synthetic construct
  misc_feature 1..20: note = Description of Artificial Sequence: Synthetic oligonucleotide
  misc_feature 1..20: note = Target: ANGPTL3; (-) strand; PAM type: NRG; PAM sequence: AAG
  source 1..20: mol_type = other DNA
ttttggttaagtgaccttgt

SEQ ID NO: 7268 - DNA, 20 bp, synthetic construct
  misc_feature 1..20: note = Description of Artificial Sequence: Synthetic oligonucleotide
  misc_feature 1..20: note = Target: ANGPTL3; (-) strand; PAM type: NRG; PAM sequence: AAG
  source 1..20: mol_type = other DNA
ggcggttgtgatttttggtt

SEQ ID NO: 7269 - DNA, 20 bp, synthetic construct
  misc_feature 1..20: note = Description of Artificial Sequence: Synthetic oligonucleotide
  misc_feature 1..20: note = Target: ANGPTL3; (-) strand; PAM type: NRG; PAM sequence: TGG
  source 1..20: mol_type = other DNA
gaccaggcggttgtgatttt

SEQ ID NO: 7270 - DNA, 20 bp, synthetic construct
  misc_feature 1..20: note = Description of Artificial Sequence: Synthetic oligonucleotide
  misc_feature 1..20: note = Target: ANGPTL3; (-) strand; PAM type: NRG; PAM sequence: CGG
  source 1..20: mol_type = other DNA
ttttcagggatgggaccagg

SEQ ID NO: 7271 - DNA, 20 bp, synthetic construct
  misc_feature 1..20: note = Description of Artificial Sequence: Synthetic oligonucleotide
  misc_feature 1..20: note = Target: ANGPTL3; (-) strand; PAM type: NRG; PAM sequence: AGG
  source 1..20: mol_type = other DNA
aagttttcagggatgggacc

SEQ ID NO: 7272 - DNA, 20 bp, synthetic construct
  misc_feature 1..20: note = Description of Artificial Sequence: Synthetic oligonucleotide
  misc_feature 1..20: note = Target: ANGPTL3; (-) strand; PAM type: NRG; PAM sequence: CAG
  source 1..20: mol_type = other DNA
gaagttttcagggatgggac

SEQ ID NO: 7273 - DNA, 20 bp, synthetic construct
  misc_feature 1..20: note = Description of Artificial Sequence: Synthetic oligonucleotide
  misc_feature 1..20: note = Target: ANGPTL3; (-) strand; PAM type: NRG; PAM sequence: GGG
  source 1..20: mol_type = other DNA
aagtagaagttttcagggat

SEQ ID NO: 7274 - DNA, 20 bp, synthetic construct
  misc_feature 1..20: note = Description of Artificial Sequence: Synthetic oligonucleotide
  misc_feature 1..20: note = Target: ANGPTL3; (-) strand; PAM type: NRG; PAM sequence: TGG
  source 1..20: mol_type = other DNA
gaagtagaagttttcaggga

SEQ ID NO: 7275 - DNA, 20 bp, synthetic construct
  misc_feature 1..20: note = Description of Artificial Sequence: Synthetic oligonucleotide
  misc_feature 1..20: note = Target: ANGPTL3; (-) strand; PAM type: NRG; PAM sequence: GGG
  source 1..20: mol_type = other DNA
taaggaagtagaagttttca

SEQ ID NO: 7276 - DNA, 20 bp, synthetic construct
  misc_feature 1..20: note = Description of Artificial Sequence: Synthetic oligonucleotide
  misc_feature 1..20: note = Target: ANGPTL3; (-) strand; PAM type: NRG; PAM sequence: AGG
  source 1..20: mol_type = other DNA
ctaaggaagtagaagttttc

SEQ ID NO: 7277 - DNA, 20 bp, synthetic construct
  misc_feature 1..20: note = Description of Artificial Sequence: Synthetic oligonucleotide
  misc_feature 1..20: note = Target: ANGPTL3; (-) strand; PAM type: NRG; PAM sequence: CAG
  source 1..20: mol_type = other DNA
gctaaggaagtagaagtttt

SEQ ID NO: 7278 - DNA, 20 bp, synthetic construct
  misc_feature 1..20: note = Description of Artificial Sequence: Synthetic oligonucleotide
  misc_feature 1..20: note = Target: ANGPTL3; (-) strand; PAM type: NRG; PAM sequence: AAG
  source 1..20: mol_type = other DNA
aaaagtagctaaggaagtag

SEQ ID NO: 7279 - DNA, 20 bp, synthetic construct
  misc_feature 1..20: note = Description of Artificial Sequence: Synthetic oligonucleotide
  misc_feature 1..20: note = Target: ANGPTL3; (-) strand; PAM type: NRG; PAM sequence: TAG
  source 1..20: mol_type = other DNA
gagaaaagtagctaaggaag

SEQ ID NO: 7280 - DNA, 20 bp, synthetic construct
  misc_feature 1..20: note = Description of Artificial Sequence: Synthetic oligonucleotide
  misc_feature 1..20: note = Target: ANGPTL3; (-) strand; PAM type: NRG; PAM sequence: AAG
  source 1..20: mol_type = other DNA
caggagaaaagtagctaagg

SEQ ID NO: 7281 - DNA, 20 bp, synthetic construct
  misc_feature 1..20: note = Description of Artificial Sequence: Synthetic oligonucleotide
  misc_feature 1..20: note = Target: ANGPTL3; (-) strand; PAM type: NRG; PAM sequence: AGG
  source 1..20: mol_type = other DNA
gtgcaggagaaaagtagcta

SEQ ID NO: 7282 - DNA, 20 bp, synthetic construct
  misc_feature 1..20: note = Description of Artificial Sequence: Synthetic oligonucleotide
  misc_feature 1..20: note = Target: ANGPTL3; (-) strand; PAM type: NRG; PAM sequence: AAG
  source 1..20: mol_type = other DNA
tgtgcaggagaaaagtagct

SEQ ID NO: 7283 - DNA, 20 bp, synthetic construct
  misc_feature 1..20: note = Description of Artificial Sequence: Synthetic oligonucleotide
  misc_feature 1..20: note = Target: ANGPTL3; (-) strand; PAM type: NRG; PAM sequence: TAG
  source 1..20: mol_type = other DNA
gtgagtgtgcaggagaaaag

SEQ ID NO: 7284 - DNA, 20 bp, synthetic construct
  misc_feature 1..20: note = Description of Artificial Sequence: Synthetic oligonucleotide
  misc_feature 1..20: note = Target: ANGPTL3; (-) strand; PAM type: NRG; PAM sequence: AAG
  source 1..20: mol_type = other DNA
aaggtgagtgtgcaggagaa

SEQ ID NO: 7285 - DNA, 20 bp, synthetic construct
  misc_feature 1..20: note = Description of Artificial Sequence: Synthetic oligonucleotide
  misc_feature 1..20: note = Target: ANGPTL3; (-) strand; PAM type: NRG; PAM sequence: GAG
  source 1..20: mol_type = other DNA
aaataaaggtgagtgtgcag

SEQ ID NO: 7286 - DNA, 20 bp, synthetic construct
  misc_feature 1..20: note = Description of Artificial Sequence: Synthetic oligonucleotide
  misc_feature 1..20: note = Target: ANGPTL3; (-) strand; PAM type: NRG; PAM sequence: AGG
  source 1..20: mol_type = other DNA
ttaaataaaggtgagtgtgc

SEQ ID NO: 7287 - DNA, 20 bp, synthetic construct
  misc_feature 1..20: note = Description of Artificial Sequence: Synthetic oligonucleotide
  misc_feature 1..20: note = Target: ANGPTL3; (-) strand; PAM type: NRG; PAM sequence: CAG
  source 1..20: mol_type = other DNA
gttaaataaaggtgagtgtg

SEQ ID NO: 7288 - DNA, 20 bp, synthetic construct
  misc_feature 1..20: note = Description of Artificial Sequence: Synthetic oligonucleotide
  misc_feature 1..20: note = Target: ANGPTL3; (-) strand; PAM type: NRG; PAM sequence: GAG
  source 1..20: mol_type = other DNA
atgttatgttaaataaaggt

SEQ ID NO: 7289 - DNA, 20 bp, synthetic construct
  misc_feature 1..20: note = Description of Artificial Sequence: Synthetic oligonucleotide
  misc_feature 1..20: note = Target: ANGPTL3; (-) strand; PAM type: NRG; PAM sequence: AGG
  source 1..20: mol_type = other DNA
atttatgttatgttaaataa

SEQ ID NO: 7290 - DNA, 20 bp, synthetic construct
  misc_feature 1..20: note = Description of Artificial Sequence: Synthetic oligonucleotide
  misc_feature 1..20: note = Target: ANGPTL3; (-) strand; PAM type: NRG; PAM sequence: AAG
  source 1..20: mol_type = other DNA
aatttatgttatgttaaata

SEQ ID NO: 7291 - DNA, 20 bp, synthetic construct
  misc_feature 1..20: note = Description of Artificial Sequence: Synthetic oligonucleotide
  misc_feature 1..20: note = Target: ANGPTL3; (-) strand; PAM type: NRG; PAM sequence: GAG
  source 1..20: mol_type = other DNA
attttagtgcaggaatagaa

SEQ ID NO: 7292 - DNA, 20 bp, synthetic construct
  misc_feature 1..20: note = Description of Artificial Sequence: Synthetic oligonucleotide
  misc_feature 1..20: note = Target: ANGPTL3; (-) strand; PAM type: NRG; PAM sequence: AAG
  source 1..20: mol_type = other DNA
acattttagtgcaggaatag

SEQ ID NO: 7293 - DNA, 20 bp, synthetic construct
  misc_feature 1..20: note = Description of Artificial Sequence: Synthetic oligonucleotide
  misc_feature 1..20: note = Target: ANGPTL3; (-) strand; PAM type: NRG; PAM sequence: TAG
  source 1..20: mol_type = other DNA
cttacattttagtgcaggaa

SEQ ID NO: 7294 - DNA, 20 bp, synthetic construct
  misc_feature 1..20: note = Description of Artificial Sequence: Synthetic oligonucleotide
  misc_feature 1..20: note = Target: ANGPTL3; (-) strand; PAM type: NRG; PAM sequence: AGG
  source 1..20: mol_type = other DNA
cagagcttacattttagtgc

SEQ ID NO: 7295 - DNA, 20 bp, synthetic construct
  misc_feature 1..20: note = Description of Artificial Sequence: Synthetic oligonucleotide
  misc_feature 1..20: note = Target: ANGPTL3; (-) strand; PAM type: NRG; PAM sequence: CAG
  source 1..20: mol_type = other DNA
acagagcttacattttagtg

SEQ ID NO: 7296 - DNA, 20 bp, synthetic construct
  misc_feature 1..20: note = Description of Artificial Sequence: Synthetic oligonucleotide
  misc_feature 1..20: note = Target: ANGPTL3; (-) strand; PAM type: NRG; PAM sequence: TAG
  source 1..20: mol_type = other DNA
tattcacagagcttacattt

SEQ ID NO: 7297 - DNA, 20 bp, synthetic construct
  misc_feature 1..20: note = Description of Artificial Sequence: Synthetic oligonucleotide
  misc_feature 1..20: note = Target: ANGPTL3; (-) strand; PAM type: NRG; PAM sequence: GAG
  source 1..20: mol_type = other DNA
aaaaaatccctgtattcaca

SEQ ID NO: 7298 - DNA, 20 bp, synthetic construct
  misc_feature 1..20: note = Description of Artificial Sequence: Synthetic oligonucleotide
  misc_feature 1..20: note = Target: ANGPTL3; (-) strand; PAM type: NRG; PAM sequence: CAG
  source 1..20: mol_type = other DNA
ggaaaaaatccctgtattca

SEQ ID NO: 7299 - DNA, 20 bp, synthetic construct
  misc_feature 1..20: note = Description of Artificial Sequence: Synthetic oligonucleotide
  misc_feature 1..20: note = Target: ANGPTL3; (-) strand; PAM type: NRG; PAM sequence: TGG
  source 1..20: mol_type = other DNA
aatggaaaatatgaagataa

SEQ ID NO: 7300 - DNA, 20 bp, synthetic construct
  misc_feature 1..20: note = Description of Artificial Sequence: Synthetic oligonucleotide
  misc_feature 1..20: note = Target: ANGPTL3; (-) strand; PAM type: NRG; PAM sequence: AAG
  source 1..20: mol_type = other DNA
tacaaataatggaaaatatg

SEQ ID NO: 7301 - DNA, 20 bp, synthetic construct
  misc_feature 1..20: note = Description of Artificial Sequence: Synthetic oligonucleotide
  misc_feature 1..20: note = Target: ANGPTL3; (-) strand; PAM type: NRG; PAM sequence: TGG
  source 1..20: mol_type = other DNA
tctggagtatatacaaataa

SEQ ID NO: 7302 - DNA, 20 bp, synthetic construct
  misc_feature 1..20: note = Description of Artificial Sequence: Synthetic oligonucleotide
  misc_feature 1..20: note = Target: ANGPTL3; (-) strand; PAM type: NRG; PAM sequence: GAG
  source 1..20: mol_type = other DNA
atacagtattctatattctg

SEQ ID NO: 7303 - DNA, 20 bp, synthetic construct
  misc_feature 1..20: note = Description of Artificial Sequence: Synthetic oligonucleotide
  misc_feature 1..20: note = Target: ANGPTL3; (-) strand; PAM type: NRG; PAM sequence: TGG
  source 1..20: mol_type = other DNA
ccatacagtattctatattc

SEQ ID NO: 7304 - DNA, 20 bp, synthetic construct
  misc_feature 1..20: note = Description of Artificial Sequence: Synthetic oligonucleotide
  misc_feature 1..20: note = Target: ANGPTL3; (-) strand; PAM type: NRG; PAM sequence: CAG
  source 1..20: mol_type = other DNA
aatgcctactgtgtgccata

SEQ ID NO: 7305 - DNA, 20 bp, synthetic construct
  misc_feature 1..20: note = Description of Artificial Sequence: Synthetic oligonucleotide
  misc_feature 1..20: note = Target: ANGPTL3; (-) strand; PAM type: NRG; PAM sequence: CAG
  source 1..20: mol_type = other DNA
cattacatttattaattcaa

SEQ ID NO: 7306 - DNA, 20 bp, synthetic construct
  misc_feature 1..20: note = Description of Artificial Sequence: Synthetic oligonucleotide
  misc_feature 1..20: note = Target: ANGPTL3; (-) strand; PAM type: NRG; PAM sequence: TAG
  source 1..20: mol_type = other DNA
aatccaagtaataataatca

SEQ ID NO: 7307 - DNA, 20 bp, synthetic construct
  misc_feature 1..20: note = Description of Artificial Sequence: Synthetic oligonucleotide
  misc_feature 1..20: note = Target: ANGPTL3; (-) strand; PAM type: NRG; PAM sequence: AAG
  source 1..20: mol_type = other DNA
cacactatttctagtaatcc

SEQ ID NO: 7308 - DNA, 20 bp, synthetic construct
  misc_feature 1..20: note = Description of Artificial Sequence: Synthetic oligonucleotide
  misc_feature 1..20: note = Target: ANGPTL3; (-) strand; PAM type: NRG; PAM sequence: TAG
  source 1..20: mol_type = other DNA
attatgaggcacactatttc

SEQ ID NO: 7309 - DNA, 20 bp, synthetic construct
  misc_feature 1..20: note = Description of Artificial Sequence: Synthetic oligonucleotide
  misc_feature 1..20: note = Target: ANGPTL3; (-) strand; PAM type: NRG; PAM sequence: AGG
  source 1..20: mol_type = other DNA
aatgttgacctttaattatg

SEQ ID NO: 7310 - DNA, 20 bp, synthetic construct
  misc_feature 1..20: note = Description of Artificial Sequence: Synthetic oligonucleotide
  misc_feature 1..20: note = Target: ANGPTL3; (-) strand; PAM type: NRG; PAM sequence: GAG
  source 1..20: mol_type = other DNA
gaatgttgacctttaattat

SEQ ID NO: 7311 - DNA, 20 bp, synthetic construct
  misc_feature 1..20: note = Description of Artificial Sequence: Synthetic oligonucleotide
  misc_feature 1..20: note = Target: ANGPTL3; (-) strand; PAM type: NRG; PAM sequence: TAG
  source 1..20: mol_type = other DNA
ttcaccagatgtttacattg

SEQ ID NO: 7312 - DNA, 20 bp, synthetic construct
  misc_feature 1..20: note = Description of Artificial Sequence: Synthetic oligonucleotide
  misc_feature 1..20: note = Target: ANGPTL3; (-) strand; PAM type: NRG; PAM sequence: CAG
  source 1..20: mol_type = other DNA
gcttccctctgtcacttcac

SEQ ID NO: 7313 - DNA, 20 bp, synthetic construct
  misc_feature 1..20: note = Description of Artificial Sequence: Synthetic oligonucleotide
  misc_feature 1..20: note = Target: ANGPTL3; (-) strand; PAM type: NRG; PAM sequence: AAG
  source 1..20: mol_type = other DNA
gacatagcttttttctaaac

SEQ ID NO: 7314 - DNA, 20 bp, synthetic construct
  misc_feature 1..20: note = Description of Artificial Sequence: Synthetic oligonucleotide
  misc_feature 1..20: note = Target: ANGPTL3; (-) strand; PAM type: NRG; PAM sequence: TAG
  source 1..20: mol_type = other DNA
agaatacatggattctgaca

SEQ ID NO: 7315 - DNA, 20 bp, synthetic construct
  misc_feature 1..20: note = Description of Artificial Sequence: Synthetic oligonucleotide
  misc_feature 1..20: note = Target: ANGPTL3; (-) strand; PAM type: NRG; PAM sequence: TGG
  source 1..20: mol_type = other DNA
gtactgcatattagaataca

SEQ ID NO: 7316 - DNA, 20 bp, synthetic construct
  misc_feature 1..20: note = Description of Artificial Sequence: Synthetic oligonucleotide
  misc_feature 1..20: note = Target: ANGPTL3; (-) strand; PAM type: NRG; PAM sequence: TAG
  source 1..20: mol_type = other DNA
taaactattgtactgcatat

SEQ ID NO: 7317 - DNA, 20 bp, synthetic construct
  misc_feature 1..20: note = Description of Artificial Sequence: Synthetic oligonucleotide
  misc_feature 1..20: note = Target: ANGPTL3; (-) strand; PAM type: NRG; PAM sequence: GAG
  source 1..20: mol_type = other DNA
cctcttgaatagctgtttga

SEQ ID NO: 7318 - DNA, 20 bp, synthetic construct
  misc_feature 1..20: note = Description of Artificial Sequence: Synthetic oligonucleotide
  misc_feature 1..20: note = Target: ANGPTL3; (-) strand; PAM type: NRG; PAM sequence: GAG
  source 1..20: mol_type = other DNA
atcctcttgaatagctgttt

SEQ ID NO: 7319 - DNA, 20 bp, synthetic construct
  misc_feature 1..20: note = Description of Artificial Sequence: Synthetic oligonucleotide
  misc_feature 1..20: note = Target: ANGPTL3; (-) strand; PAM type: NRG; PAM sequence: TAG
  source 1..20: mol_type = other DNA
gttttttgaatcctcttgaa

SEQ ID NO: 7320 - DNA, 20 bp, synthetic construct
  misc_feature 1..20: note = Description of Artificial Sequence: Synthetic oligonucleotide
  misc_feature 1..20: note = Target: ANGPTL3; (-) strand; PAM type: NRG; PAM sequence: GAG
  source 1..20: mol_type = other DNA
ttttgtttaccagtttctct

SEQ ID NO: 7321 - DNA, 20 bp, synthetic construct
  misc_feature 1..20: note = Description of Artificial Sequence: Synthetic oligonucleotide
  misc_feature 1..20: note = Target: ANGPTL3; (-) strand; PAM type: NRG; PAM sequence: CAG
  source 1..20: mol_type = other DNA
ttgaaaatgattttgtttac

SEQ ID NO: 7322 - DNA, 20 bp, synthetic construct
  misc_feature 1..20: note = Description of Artificial Sequence: Synthetic oligonucleotide
  misc_feature 1..20: note = Target: ANGPTL3; (-) strand; PAM type: NRG; PAM sequence: TGG
  source 1..20: mol_type = other DNA
tatgtttgtttagtggaaat

SEQ ID NO: 7323 - DNA, 20 bp, synthetic construct
  misc_feature 1..20: note = Description of Artificial Sequence: Synthetic oligonucleotide
  misc_feature 1..20: note = Target: ANGPTL3; (-) strand; PAM type: NRG; PAM sequence: TGG
  source 1..20: mol_type = other DNA
ctaacattatgtttgtttag

SEQ ID NO: 7324 - DNA, 20 bp, synthetic construct
  misc_feature 1..20: note = Description of Artificial Sequence: Synthetic oligonucleotide
  misc_feature 1..20: note = Target: ANGPTL3; (-) strand; PAM type: NRG; PAM sequence: TAG
  source 1..20: mol_type = other DNA
ctactaacattatgtttgtt

SEQ ID NO: 7325 - DNA, 20 bp, synthetic construct
  misc_feature 1..20: note = Description of Artificial Sequence: Synthetic oligonucleotide
  misc_feature 1..20: note = Target: ANGPTL3; (-) strand; PAM type: NRG; PAM sequence: CAG
  source 1..20: mol_type = other DNA
gttgataaaaaaccttttag

SEQ ID NO: 7326 - DNA, 20 bp, synthetic construct
  misc_feature 1..20: note = Description of Artificial Sequence: Synthetic oligonucleotide
  misc_feature 1..20: note = Target: ANGPTL3; (-) strand; PAM type: NRG; PAM sequence: TAG
  source 1..20: mol_type = other DNA
gtagttgataaaaaaccttt

SEQ ID NO: 7327 - DNA, 20 bp, synthetic construct
  misc_feature 1..20: note = Description of Artificial Sequence: Synthetic oligonucleotide
  misc_feature 1..20: note = Target: ANGPTL3; (-) strand; PAM type: NRG; PAM sequence: TAG
  source 1..20: mol_type = other DNA
gaaagtatggaaaccaaaag

SEQ ID NO: 7328 - DNA, 20 bp, synthetic construct
  misc_feature 1..20: note = Description of Artificial Sequence: Synthetic oligonucleotide
  misc_feature 1..20: note = Target: ANGPTL3; (-) strand; PAM type: NRG; PAM sequence: AAG
  source 1..20: mol_type = other DNA
aaggaaagtatggaaaccaa

SEQ ID NO: 7329 - DNA, 20 bp, synthetic construct
  misc_feature 1..20: note = Description of Artificial Sequence: Synthetic oligonucleotide
  misc_feature 1..20: note = Target: ANGPTL3; (-) strand; PAM type: NRG; PAM sequence: TGG
  source 1..20: mol_type = other DNA
acatcataagaaggaaagta

SEQ ID NO: 7330 - DNA, 20 bp, synthetic construct
  misc_feature 1..20: note = Description of Artificial Sequence: Synthetic oligonucleotide
  misc_feature 1..20: note = Target: ANGPTL3; (-) strand; PAM type: NRG; PAM sequence: AAG
  source 1..20: mol_type = other DNA
taataacatcataagaagga

SEQ ID NO: 7331 - DNA, 20 bp, synthetic construct
  misc_feature 1..20: note = Description of Artificial Sequence: Synthetic oligonucleotide
  misc_feature 1..20: note = Target: ANGPTL3; (-) strand; PAM type: NRG; PAM sequence: AGG
  source 1..20: mol_type = other DNA
agaataataacatcataaga

SEQ ID NO: 7332 - DNA, 20 bp, synthetic construct
  misc_feature 1..20: note = Description of Artificial Sequence: Synthetic oligonucleotide
  misc_feature 1..20: note = Target: ANGPTL3; (-) strand; PAM type: NRG; PAM sequence: AAG
  source 1..20: mol_type = other DNA
tagaataataacatcataag

SEQ ID NO: 7333 - DNA, 20 bp, synthetic construct
  misc_feature 1..20: note = Description of Artificial Sequence: Synthetic oligonucleotide
  misc_feature 1..20: note = Target: ANGPTL3; (-) strand; PAM type: NRG; PAM sequence: AAG
  source 1..20: mol_type = other DNA
atttagaataataacatcat

SEQ ID NO: 7334 - DNA, 20 bp, synthetic construct
  misc_feature 1..20: note = Description of Artificial Sequence: Synthetic oligonucleotide
  misc_feature 1..20: note = Target: ANGPTL3; (-) strand; PAM type: NRG; PAM sequence: TAG
  source 1..20: mol_type = other DNA
agatataattgaaaagaatt

SEQ ID NO: 7335 - DNA, 20 bp, synthetic construct
  misc_feature 1..20: note = Description of Artificial Sequence: Synthetic oligonucleotide
  misc_feature 1..20: note = Target: ANGPTL3; (-) strand; PAM type: NRG; PAM sequence: AAG
  source 1..20: mol_type = other DNA
tagtaaaagatataattgaa

SEQ ID NO: 7336 - DNA, 20 bp, synthetic construct
  misc_feature 1..20: note = Description of Artificial Sequence: Synthetic oligonucleotide
  misc_feature 1..20: note = Target: ANGPTL3; (-) strand; PAM type: NRG; PAM sequence: AAG
  source 1..20: mol_type = other DNA
ggttcatttaatcatagtaa

SEQ ID NO: 7337 - DNA, 20 bp, synthetic construct
  misc_feature 1..20: note = Description of Artificial Sequence: Synthetic oligonucleotide
  misc_feature 1..20: note = Target: ANGPTL3; (-) strand; PAM type: NRG; PAM sequence: TAG
  source 1..20: mol_type = other DNA
ggagcaggttcatttaatca

SEQ ID NO: 7338 - DNA, 20 bp, synthetic construct
  misc_feature 1..20: note = Description of Artificial Sequence: Synthetic oligonucleotide
  misc_feature 1..20: note = Target: ANGPTL3; (-) strand; PAM type: NRG; PAM sequence: AGG
  source 1..20: mol_type = other DNA
aacattttgctttggggagc

SEQ ID NO: 7339 - DNA, 20 bp, synthetic construct
  misc_feature 1..20: note = Description of Artificial Sequence: Synthetic oligonucleotide
  misc_feature 1..20: note = Target: ANGPTL3; (-) strand; PAM type: NRG; PAM sequence: CAG
  source 1..20: mol_type = other DNA
taacattttgctttggggag

SEQ ID NO: 7340 - DNA, 20 bp, synthetic construct
  misc_feature 1..20: note = Description of Artificial Sequence: Synthetic oligonucleotide
  misc_feature 1..20: note = Target: ANGPTL3; (-) strand; PAM type: NRG; PAM sequence: GAG
  source 1..20: mol_type = other DNA
tagtaacattttgctttggg

SEQ ID NO: 7341 - DNA, 20 bp, synthetic construct
  misc_feature 1..20: note = Description of Artificial Sequence: Synthetic oligonucleotide
  misc_feature 1..20: note = Target: ANGPTL3; (-) strand; PAM type: NRG; PAM sequence: GGG
  source 1..20: mol_type = other DNA
tatagtaacattttgctttg

SEQ ID NO: 7342 - DNA, 20 bp, synthetic construct
  misc_feature 1..20: note = Description of Artificial Sequence: Synthetic oligonucleotide
  misc_feature 1..20: note = Target: ANGPTL3; (-) strand; PAM type: NRG; PAM sequence: GGG
  source 1..20: mol_type = other DNA
ctatagtaacattttgcttt

SEQ ID NO: 7343 - DNA, 20 bp, synthetic construct
  misc_feature 1..20: note = Description of Artificial Sequence: Synthetic oligonucleotide
  misc_feature 1..20: note = Target: ANGPTL3; (-) strand; PAM type: NRG; PAM sequence: TGG
  source 1..20: mol_type = other DNA
actatagtaacattttgctt

SEQ ID NO: 7344 - DNA, 20 bp, synthetic construct
  misc_feature 1..20: note = Description of Artificial Sequence: Synthetic oligonucleotide
  misc_feature 1..20: note = Target: ANGPTL3; (-) strand; PAM type: NRG; PAM sequence: TAG
  source 1..20: mol_type = other DNA
agacacaatgtatattacta

SEQ ID NO: 7345 - DNA, 20 bp, synthetic construct
  misc_feature 1..20: note = Description of Artificial Sequence: Synthetic oligonucleotide
  misc_feature 1..20: note = Target: ANGPTL3; (-) strand; PAM type: NRG; PAM sequence: TAG
  source 1..20: mol_type = other DNA
tcttcacacatttttatttt

SEQ ID NO: 7346 - DNA, 20 bp, synthetic construct
  misc_feature 1..20: note = Description of Artificial Sequence: Synthetic oligonucleotide
  misc_feature 1..20: note = Target: ANGPTL3; (-) strand; PAM type: NRG; PAM sequence: TGG
  source 1..20: mol_type = other DNA
aactcagaaattcattgttt

SEQ ID NO: 7347 - DNA, 20 bp, synthetic construct
  misc_feature 1..20: note = Description of Artificial Sequence: Synthetic oligonucleotide
  misc_feature 1..20: note = Target: ANGPTL3; (-) strand; PAM type: NRG; PAM sequence: CAG
  source 1..20: mol_type = other DNA
atctaactcttcttccaact

SEQ ID NO: 7348 - DNA, 20 bp, synthetic construct
  misc_feature 1..20: note = Description of Artificial Sequence: Synthetic oligonucleotide
  misc_feature 1..20: note = Target: ANGPTL3; (-) strand; PAM type: NRG; PAM sequence: AAG
  source 1..20: mol_type = other DNA
tttttaatttaaatatgaga

SEQ ID NO: 7349 - DNA, 20 bp, synthetic construct
  misc_feature 1..20: note = Description of Artificial Sequence: Synthetic oligonucleotide
  misc_feature 1..20: note = Target: ANGPTL3; (-) strand; PAM type: NRG; PAM sequence: GAG
  source 1..20: mol_type = other DNA
tgtttttttaatttaaatat

SEQ ID NO: 7350 - DNA, 20 bp, synthetic construct
  misc_feature 1..20: note = Description of Artificial Sequence: Synthetic oligonucleotide
  misc_feature 1..20: note = Target: ANGPTL3; (-) strand; PAM type: NRG; PAM sequence: GAG
  source 1..20: mol_type = other DNA
taaagttacttaaattttta

SEQ ID NO: 7351 - DNA, 20 bp, synthetic construct
  misc_feature 1..20: note = Description of Artificial Sequence: Synthetic oligonucleotide
  misc_feature 1..20: note = Target: ANGPTL3; (-) strand; PAM type: NRG; PAM sequence: TAG
  source 1..20: mol_type = other DNA
cttaaagttacttaaatttt

SEQ ID NO: 7352 - DNA, 20 bp, synthetic construct
  misc_feature 1..20: note = Description of Artificial Sequence: Synthetic oligonucleotide
  misc_feature 1..20: note = Target: ANGPTL3; (-) strand; PAM type: NRG; PAM sequence: AAG
  source 1..20: mol_type = other DNA
taagtaactatgtgatctta

SEQ ID NO: 7353 - DNA, 20 bp, synthetic construct
  misc_feature 1..20: note = Description of Artificial Sequence: Synthetic oligonucleotide
  misc_feature 1..20: note = Target: ANGPTL3; (-) strand; PAM type: NRG; PAM sequence: AAG
  source 1..20: mol_type = other DNA
gggtattactcttttctact

SEQ ID NO: 7354 - DNA, 20 bp, synthetic construct
  misc_feature 1..20: note = Description of Artificial Sequence: Synthetic oligonucleotide
  misc_feature 1..20: note = Target: ANGPTL3; (-) strand; PAM type: NRG; PAM sequence: GGG
  source 1..20: mol_type = other DNA
tattgtaaagtttgcttgct

SEQ ID NO: 7355 - DNA, 20 bp, synthetic construct
  misc_feature 1..20: note = Description of Artificial Sequence: Synthetic oligonucleotide
  misc_feature 1..20: note = Target: ANGPTL3; (-) strand; PAM type: NRG; PAM sequence: TGG
  source 1..20: mol_type = other DNA
ctattgtaaagtttgcttgc

SEQ ID NO: 7356 - DNA, 20 bp, synthetic construct
  misc_feature 1..20: note = Description of Artificial Sequence: Synthetic oligonucleotide
  misc_feature 1..20: note = Target: ANGPTL3; (-) strand; PAM type: NRG; PAM sequence: AAG
  source 1..20: mol_type = other DNA
atttaaaaggatctattgta

SEQ ID NO: 7357 - DNA, 20 bp, synthetic construct
  misc_feature 1..20: note = Description of Artificial Sequence: Synthetic oligonucleotide
  misc_feature 1..20: note = Target: ANGPTL3; (-) strand; PAM type: NRG; PAM sequence: AGG
  source 1..20: mol_type = other DNA
ttcctaggaccttatttaaa

SEQ ID NO: 7358 - DNA, 20 bp, synthetic construct
  misc_feature 1..20: note = Description of Artificial Sequence: Synthetic oligonucleotide
  misc_feature 1..20: note = Target: ANGPTL3; (-) strand; PAM type: NRG; PAM sequence: AAG
  source 1..20: mol_type = other DNA
tttcctaggaccttatttaa

SEQ ID NO: 7359 - DNA, 20 bp, synthetic construct
  misc_feature 1..20: note = Description of Artificial Sequence: Synthetic oligonucleotide
  misc_feature 1..20: note = Target: ANGPTL3; (-) strand; PAM type: NRG; PAM sequence: AGG
  source 1..20: mol_type = other DNA
tggcatgaatgatatttcct

SEQ ID NO: 7360 - DNA, 20 bp, synthetic construct
  misc_feature 1..20: note = Description of Artificial Sequence: Synthetic oligonucleotide
  misc_feature 1..20: note = Target: ANGPTL3; (-) strand; PAM type: NRG; PAM sequence: TAG
  source 1..20: mol_type = other DNA
ctggcatgaatgatatttcc

SEQ ID NO: 7361 - DNA, 20 bp, synthetic construct
  misc_feature 1..20: note = Description of Artificial Sequence: Synthetic oligonucleotide
  misc_feature 1..20: note = Target: ANGPTL3; (-) strand; PAM type: NRG; PAM sequence: TGG
  source 1..20: mol_type = other DNA
tagtgttagttttttgatgc

SEQ ID NO: 7362 - DNA, 20 bp, synthetic construct
  misc_feature 1..20: note = Description of Artificial Sequence: Synthetic oligonucleotide
  misc_feature 1..20: note = Target: ANGPTL3; (-) strand; PAM type: NRG; PAM sequence: TAG
  source 1..20: mol_type = other DNA
atatcttgcattattagtgt

SEQ ID NO: 7363 - DNA, 20 bp, synthetic construct
  misc_feature 1..20: note = Description of Artificial Sequence: Synthetic oligonucleotide
  misc_feature 1..20: note = Target: ANGPTL3; (-) strand; PAM type: NRG; PAM sequence: TAG
  source 1..20: mol_type = other DNA
tatataatatcttgcattat

SEQ ID NO: 7364 - DNA, 20 bp, synthetic construct
  misc_feature 1..20: note = Description of Artificial Sequence: Synthetic oligonucleotide
  misc_feature 1..20: note = Target: ANGPTL3; (-) strand; PAM type: NRG; PAM sequence: CAG
  source 1..20: mol_type = other DNA
ctcattgacagtaagaaaag

SEQ ID NO: 7365 - DNA, 20 bp, synthetic construct
  misc_feature 1..20: note = Description of Artificial Sequence: Synthetic oligonucleotide
  misc_feature 1..20: note = Target: ANGPTL3; (-) strand; PAM type: NRG; PAM sequence: AAG
  source 1..20: mol_type = other DNA
tttctcattgacagtaagaa

SEQ ID NO: 7366 - DNA, 20 bp, synthetic construct
  misc_feature 1..20: note = Description of Artificial Sequence: Synthetic oligonucleotide
  misc_feature 1..20: note = Target: ANGPTL3; (-) strand; PAM type: NRG; PAM sequence: AAG
  source 1..20: mol_type = other DNA
tagtttttctcattgacagt

SEQ ID NO: 7367 - DNA, 20 bp, synthetic construct
  misc_feature 1..20: note = Description of Artificial Sequence: Synthetic oligonucleotide
  misc_feature 1..20: note = Target: ANGPTL3; (-) strand; PAM type: NRG; PAM sequence: CAG
  source 1..20: mol_type = other DNA
atgatagtttttctcattga

SEQ ID NO: 7368 - DNA, 20 bp, synthetic construct
  misc_feature 1..20: note = Description of Artificial Sequence: Synthetic oligonucleotide
  misc_feature 1..20: note = Target: ANGPTL3; (-) strand; PAM type: NRG; PAM sequence: TAG
  source 1..20: mol_type = other DNA
gtttgcaatttattgaatga

SEQ ID NO: 7369 - DNA, 20 bp, synthetic construct
  misc_feature 1..20: note = Description of Artificial Sequence: Synthetic oligonucleotide
  misc_feature 1..20: note = Target: ANGPTL3; (-) strand; PAM type: NRG; PAM sequence: GGG
  source 1..20: mol_type = other DNA
tatttttatttaagtgtgtt

SEQ ID NO: 7370 - DNA, 20 bp, synthetic construct
  misc_feature 1..20: note = Description of Artificial Sequence: Synthetic oligonucleotide
  misc_feature 1..20: note = Target: ANGPTL3; (-) strand; PAM type: NRG; PAM sequence: TGG
  source 1..20: mol_type = other DNA
ttatttttatttaagtgtgt

SEQ ID NO: 7371 - DNA, 20 bp, synthetic construct
  misc_feature 1..20: note = Description of Artificial Sequence: Synthetic oligonucleotide
  misc_feature 1..20: note = Target: ANGPTL3; (-) strand; PAM type: NRG; PAM sequence: AAG
  source 1..20: mol_type = other DNA
gtaacattttatttttattt

SEQ ID NO: 7372 - DNA, 20 bp, synthetic construct
  misc_feature 1..20: note = Description of Artificial Sequence: Synthetic oligonucleotide
  misc_feature 1..20: note = Target: ANGPTL3; (-) strand; PAM type: NRG; PAM sequence: CAG
  source 1..20: mol_type = other DNA
gtagtttatcgttagtttag

SEQ ID NO: 7373 - DNA, 20 bp, synthetic construct
  misc_feature 1..20: note = Description of Artificial Sequence: Synthetic oligonucleotide
  misc_feature 1..20: note = Target: ANGPTL3; (-) strand; PAM type: NRG; PAM sequence: TAG
  source 1..20: mol_type = other DNA
tcagtagtttatcgttagtt

SEQ ID NO: 7374 - DNA, 20 bp, synthetic construct
  misc_feature 1..20: note = Description of Artificial Sequence: Synthetic oligonucleotide
  misc_feature 1..20: note = Target: ANGPTL3; (-) strand; PAM type: NRG; PAM sequence: TAG
  source 1..20: mol_type = other DNA
tatattcagtagtttatcgt

SEQ ID NO: 7375 - DNA, 20 bp, synthetic construct
  misc_feature 1..20: note = Description of Artificial Sequence: Synthetic oligonucleotide
  misc_feature 1..20: note = Target: ANGPTL3; (-) strand; PAM type: NRG; PAM sequence: TAG
  source 1..20: mol_type = other DNA
cttactttctatatattcag

SEQ ID NO: 7376 - DNA, 20 bp, synthetic construct
  misc_feature 1..20: note = Description of Artificial Sequence: Synthetic oligonucleotide
  misc_feature 1..20: note = Target: ANGPTL3; (-) strand; PAM type: NRG; PAM sequence: CAG
  source 1..20: mol_type = other DNA
ttgcttactttctatatatt

SEQ ID NO: 7377 - DNA, 20 bp, synthetic construct
  misc_feature 1..20: note = Description of Artificial Sequence: Synthetic oligonucleotide
  misc_feature 1..20: note = Target: ANGPTL3; (-) strand; PAM type: NRG; PAM sequence: AAG
  source 1..20: mol_type = other DNA
gtagatgttggcaggttggc

SEQ ID NO: 7378 - DNA, 20 bp, synthetic construct
  misc_feature 1..20: note = Description of Artificial Sequence: Synthetic oligonucleotide
  misc_feature 1..20: note = Target: ANGPTL3; (-) strand; PAM type: NRG; PAM sequence: TGG
  source 1..20: mol_type = other DNA
atctgtagatgttggcaggt

SEQ ID NO: 7379 - DNA, 20 bp, synthetic construct
  misc_feature 1..20: note = Description of Artificial Sequence: Synthetic oligonucleotide
  misc_feature 1..20: note = Target: ANGPTL3; (-) strand; PAM type: NRG; PAM sequence: AGG
  source 1..20: mol_type = other DNA
acatatctgtagatgttggc

SEQ ID NO: 7380 - DNA, 20 bp, synthetic construct
  misc_feature 1..20: note = Description of Artificial Sequence: Synthetic oligonucleotide
  misc_feature 1..20: note = Target: ANGPTL3; (-) strand; PAM type: NRG; PAM sequence: CAG
  source 1..20: mol_type = other DNA
aacatatctgtagatgttgg

SEQ ID NO: 7381 - DNA, 20 bp, synthetic construct
  misc_feature 1..20: note = Description of Artificial Sequence: Synthetic oligonucleotide
  misc_feature 1..20: note = Target: ANGPTL3; (-) strand; PAM type: NRG; PAM sequence: TGG
  source 1..20: mol_type = other DNA
gtaaacatatctgtagatgt

SEQ ID NO: 7382 - DNA, 20 bp, synthetic construct
  misc_feature 1..20: note = Description of Artificial Sequence: Synthetic oligonucleotide
  misc_feature 1..20: note = Target: ANGPTL3; (-) strand; PAM type: NRG; PAM sequence: TAG
  source 1..20: mol_type = other DNA
ttgacctgtaaacatatctg

SEQ ID NO: 7383 - DNA, 20 bp, synthetic construct
  misc_feature 1..20: note = Description of Artificial Sequence: Synthetic oligonucleotide
  misc_feature 1..20: note = Target: ANGPTL3; (-) strand; PAM type: NRG; PAM sequence: AGG
  source 1..20: mol_type = other DNA
cataatacataatttgaacc

SEQ ID NO: 7384 - DNA, 20 bp, synthetic construct
  misc_feature 1..20: note = Description of Artificial Sequence: Synthetic oligonucleotide
  misc_feature 1..20: note = Target: ANGPTL3; (-) strand; PAM type: NRG; PAM sequence: CAG
  source 1..20: mol_type = other DNA
acataatacataatttgaac

SEQ ID NO: 7385 - DNA, 20 bp, synthetic construct
  misc_feature 1..20: note = Description of Artificial Sequence: Synthetic oligonucleotide
  misc_feature 1..20: note = Target: ANGPTL3; (-) strand; PAM type: NRG; PAM sequence: AAG
  source 1..20: mol_type = other DNA
tgatcttcagacctgtgata

SEQ ID NO: 7386 - DNA, 20 bp, synthetic construct
  misc_feature 1..20: note = Description of Artificial Sequence: Synthetic oligonucleotide
  misc_feature 1..20: note = Target: ANGPTL3; (-) strand; PAM type: NRG; PAM sequence: CAG
  source 1..20: mol_type = other DNA
ttttaggtcttactgatctt

SEQ ID NO: 7387 - DNA, 20 bp, synthetic construct
  misc_feature 1..20: note = Description of Artificial Sequence: Synthetic oligonucleotide
  misc_feature 1..20: note = Target: ANGPTL3; (-) strand; PAM type: NRG; PAM sequence: AGG
  source 1..20: mol_type = other DNA
gtttaataattttcagtttt

SEQ ID NO: 7388 - DNA, 20 bp, synthetic construct
  misc_feature 1..20: note = Description of Artificial Sequence: Synthetic oligonucleotide
  misc_feature 1..20: note = Target: ANGPTL3; (-) strand; PAM type: NRG; PAM sequence: TAG
  source 1..20: mol_type = other DNA
agtttaataattttcagttt

SEQ ID NO: 7389 - DNA, 20 bp, synthetic construct
  misc_feature 1..20: note = Description of Artificial Sequence: Synthetic oligonucleotide
  misc_feature 1..20: note = Target: ANGPTL3; (-) strand; PAM type: NRG; PAM sequence: CAG
  source 1..20: mol_type = other DNA
attttaagtttaataatttt

SEQ ID NO: 7390 - DNA, 20 bp, synthetic construct
  misc_feature 1..20: note = Description of Artificial Sequence: Synthetic oligonucleotide
  misc_feature 1..20: note = Target: ANGPTL3; (-) strand; PAM type: NRG; PAM sequence: AAG
  source 1..20: mol_type = other DNA
tgatattctgttcagatttt

SEQ ID NO: 7391 - DNA, 20 bp, synthetic construct
  misc_feature 1..20: note = Description of Artificial Sequence: Synthetic oligonucleotide
  misc_feature 1..20: note = Target: ANGPTL3; (-) strand; PAM type: NRG; PAM sequence: CAG
  source 1..20: mol_type = other DNA
aatatatttgatattctgtt

SEQ ID NO: 7392 - DNA, 20 bp, synthetic construct
  misc_feature 1..20: note = Description of Artificial Sequence: Synthetic oligonucleotide
  misc_feature 1..20: note = Target: ANGPTL3; (-) strand; PAM type: NRG; PAM sequence: TAG
  source 1..20: mol_type = other DNA
aaagtagagactgctttgct

SEQ ID NO: 7393 - DNA, 20 bp, synthetic construct
  misc_feature 1..20: note = Description of Artificial Sequence: Synthetic oligonucleotide
  misc_feature 1..20: note = Target: ANGPTL3; (-) strand; PAM type: NRG; PAM sequence: GAG
  source 1..20: mol_type = other DNA
acagagcaaggccaaaagta

SEQ ID NO: 7394 - DNA, 20 bp, synthetic construct
  misc_feature 1..20: note = Description of Artificial Sequence: Synthetic oligonucleotide
  misc_feature 1..20: note = Target: ANGPTL3; (-) strand; PAM type: NRG; PAM sequence: TAG
  source 1..20: mol_type = other DNA
aaacagagcaaggccaaaag

SEQ ID NO: 7395 - DNA, 20 bp, synthetic construct
  misc_feature 1..20: note = Description of Artificial Sequence: Synthetic oligonucleotide
  misc_feature 1..20: note = Target: ANGPTL3; (-) strand; PAM type: NRG; PAM sequence: AAG
  source 1..20: mol_type = other DNA
ggaaaacagagcaaggccaa

SEQ ID NO: 7396 - DNA, 20 bp, synthetic construct
  misc_feature 1..20: note = Description of Artificial Sequence: Synthetic oligonucleotide
  misc_feature 1..20: note = Target: ANGPTL3; (-) strand; PAM type: NRG; PAM sequence: AGG
  source 1..20: mol_type = other DNA
attggtcggaaaacagagca

SEQ ID NO: 7397 - DNA, 20 bp, synthetic construct
  misc_feature 1..20: note = Description of Artificial Sequence: Synthetic oligonucleotide
  misc_feature 1..20: note = Target: ANGPTL3; (-) strand; PAM type: NRG; PAM sequence: AAG
  source 1..20: mol_type = other DNA
cattggtcggaaaacagagc

SEQ ID NO: 7398 - DNA, 20 bp, synthetic construct
  misc_feature 1..20: note = Description of Artificial Sequence: Synthetic oligonucleotide
  misc_feature 1..20: note = Target: ANGPTL3; (-) strand; PAM type: NRG; PAM sequence: GAG
  source 1..20: mol_type = other DNA
cagacattggtcggaaaaca

SEQ ID NO: 7399 - DNA, 20 bp, synthetic construct
  misc_feature 1..20: note = Description of Artificial Sequence: Synthetic oligonucleotide
  misc_feature 1..20: note = Target: ANGPTL3; (-) strand; PAM type: NRG; PAM sequence: CAG
  source 1..20: mol_type = other DNA
agcagacattggtcggaaaa

SEQ ID NO: 7400 - DNA, 20 bp, synthetic construct
  misc_feature 1..20: note = Description of Artificial Sequence: Synthetic oligonucleotide
  misc_feature 1..20: note = Target: ANGPTL3; (-) strand; PAM type: NRG; PAM sequence: CGG
  source 1..20: mol_type = other DNA
gcaaaaaagcagacattggt

SEQ ID NO: 7401 - DNA, 20 bp, synthetic construct
  misc_feature 1..20: note = Description of Artificial Sequence: Synthetic oligonucleotide
  misc_feature 1..20: note = Target: ANGPTL3; (-) strand; PAM type: NRG; PAM sequence: TGG
  source 1..20: mol_type = other DNA
caaggcaaaaaagcagacat

SEQ ID NO: 7402 - DNA, 20 bp, synthetic construct
  misc_feature 1..20: note = Description of Artificial Sequence: Synthetic oligonucleotide
  misc_feature 1..20: note = Target: ANGPTL3; (-) strand; PAM type: NRG; PAM sequence: CAG
  source 1..20: mol_type = other DNA
aataaagcaaggcaaaaaag

SEQ ID NO: 7403 - DNA, 20 bp, synthetic construct
  misc_feature 1..20: note = Description of Artificial Sequence: Synthetic oligonucleotide
  misc_feature 1..20: note = Target: ANGPTL3; (-) strand; PAM type: NRG; PAM sequence: AAG
  source 1..20: mol_type = other DNA
aaaaataaagcaaggcaaaa

SEQ ID NO: 7404 - DNA, 20 bp, synthetic construct
  misc_feature 1..20: note = Description of Artificial Sequence: Synthetic oligonucleotide
  misc_feature 1..20: note = Target: ANGPTL3; (-) strand; PAM type: NRG; PAM sequence: AGG
  source 1..20: mol_type = other DNA
taagataaaaaaataaagca

SEQ ID NO: 7405 - DNA, 20 bp, synthetic construct
  misc_feature 1..20: note = Description of Artificial Sequence: Synthetic oligonucleotide
  misc_feature 1..20: note = Target: ANGPTL3; (-) strand; PAM type: NRG; PAM sequence: AAG
  source 1..20: mol_type = other DNA
ataagataaaaaaataaagc

SEQ ID NO: 7406 - DNA, 20 bp, synthetic construct
  misc_feature 1..20: note = Description of Artificial Sequence: Synthetic oligonucleotide
  misc_feature 1..20: note = Target: ANGPTL3; (-) strand; PAM type: NRG; PAM sequence: AAG
  source 1..20: mol_type = other DNA
tttaataagataaaaaaata

SEQ ID NO: 7407 - DNA, 20 bp, synthetic construct
  misc_feature 1..20: note = Description of Artificial Sequence: Synthetic oligonucleotide
  misc_feature 1..20: note = Target: ANGPTL3; (-) strand; PAM type: NRG; PAM sequence: AAG
  source 1..20: mol_type = other DNA
aatcagggacattatttaat

SEQ ID NO: 7408 - DNA, 20 bp, synthetic construct
  misc_feature 1..20: note = Description of Artificial Sequence: Synthetic oligonucleotide
  misc_feature 1..20: note = Target: ANGPTL3; (-) strand; PAM type: NRG; PAM sequence: GGG
  source 1..20: mol_type = other DNA
gttctcaaaatatttaatca

SEQ ID NO: 7409 - DNA, 20 bp, synthetic construct
  misc_feature 1..20: note = Description of Artificial Sequence: Synthetic oligonucleotide
  misc_feature 1..20: note = Target: ANGPTL3; (-) strand; PAM type: NRG; PAM sequence: AGG
  source 1..20: mol_type = other DNA
tgttctcaaaatatttaatc

SEQ ID NO: 7410 - DNA, 20 bp, synthetic construct
  misc_feature 1..20: note = Description of Artificial Sequence: Synthetic oligonucleotide
  misc_feature 1..20: note = Target: ANGPTL3; (-) strand; PAM type: NRG; PAM sequence: CAG
  source 1..20: mol_type = other DNA
ctgttctcaaaatatttaat

SEQ ID NO: 7411 - DNA, 20 bp, synthetic construct
  misc_feature 1..20: note = Description of Artificial Sequence: Synthetic oligonucleotide
  misc_feature 1..20: note = Target: ANGPTL3; (-) strand; PAM type: NRG; PAM sequence: CAG
  source 1..20: mol_type = other DNA
acagtgttattcagattgta

SEQ ID NO: 7412 - DNA, 20 bp, synthetic construct
  misc_feature 1..20: note = Description of Artificial Sequence: Synthetic oligonucleotide
  misc_feature 1..20: note = Target: ANGPTL3; (-) strand; PAM type: NRG; PAM sequence: CAG
  source 1..20: mol_type = other DNA
tttagataaacagtgttatt

SEQ ID NO: 7413 - DNA, 20 bp, synthetic construct
  misc_feature 1..20: note = Description of Artificial Sequence: Synthetic oligonucleotide
  misc_feature 1..20: note = Target: ANGPTL3; (-) strand; PAM type: NRG; PAM sequence: CAG
  source 1..20: mol_type = other DNA
gtgtttgatatttagataaa

SEQ ID NO: 7414 - DNA, 20 bp, synthetic construct
  misc_feature 1..20: note = Description of Artificial Sequence: Synthetic oligonucleotide
  misc_feature 1..20: note = Target: ANGPTL3; (-) strand; PAM type: NRG; PAM sequence: TAG
  source 1..20: mol_type = other DNA
ttataacggtgtttgatatt

SEQ ID NO: 7415 - DNA, 20 bp, synthetic construct
  misc_feature 1..20: note = Description of Artificial Sequence: Synthetic oligonucleotide
  misc_feature 1..20: note = Target: ANGPTL3; (-) strand; PAM type: NRG; PAM sequence: CGG
  source 1..20: mol_type = other DNA
ttcagttcataatgttataa

SEQ ID NO: 7416 - DNA, 20 bp, synthetic construct
  misc_feature 1..20: note = Description of Artificial Sequence: Synthetic oligonucleotide
  misc_feature 1..20: note = Target: ANGPTL3; (-) strand; PAM type: NRG; PAM sequence: CAG
  source 1..20: mol_type = other DNA
cagaagtacagtttgtcttt

SEQ ID NO: 7417 - DNA, 20 bp, synthetic construct
  misc_feature 1..20: note = Description of Artificial Sequence: Synthetic oligonucleotide
  misc_feature 1..20: note = Target: ANGPTL3; (-) strand; PAM type: NRG; PAM sequence: CAG
  source 1..20: mol_type = other DNA
gagtaaggatgtcagaagta

SEQ ID NO: 7418 - DNA, 20 bp, synthetic construct
  misc_feature 1..20: note = Description of Artificial Sequence: Synthetic oligonucleotide
  misc_feature 1..20: note = Target: ANGPTL3; (-) strand; PAM type: NRG; PAM sequence: AAG
  source 1..20: mol_type = other DNA
aatctgagtaaggatgtcag

SEQ ID NO: 7419 - DNA, 20 bp, synthetic construct
  misc_feature 1..20: note = Description of Artificial Sequence: Synthetic oligonucleotide
  misc_feature 1..20: note = Target: ANGPTL3; (-) strand; PAM type: NRG; PAM sequence: CAG
  source 1..20: mol_type = other DNA
ggaaatctgagtaaggatgt

SEQ ID NO: 7420 - DNA, 20 bp, synthetic construct
  misc_feature 1..20: note = Description of Artificial Sequence: Synthetic oligonucleotide
  misc_feature 1..20: note = Target: ANGPTL3; (-) strand; PAM type: NRG; PAM sequence: AGG
  source 1..20: mol_type = other DNA
aattaggggaaatctgagta

SEQ ID NO: 7421 - DNA, 20 bp, synthetic construct
  misc_feature 1..20: note = Description of Artificial Sequence: Synthetic oligonucleotide
  misc_feature 1..20: note = Target: ANGPTL3; (-) strand; PAM type: NRG; PAM sequence: AAG
  source 1..20: mol_type = other DNA
caattaggggaaatctgagt

SEQ ID NO: 7422 - DNA, 20 bp, synthetic construct
  misc_feature 1..20: note = Description of Artificial Sequence: Synthetic oligonucleotide
  misc_feature 1..20: note = Target: ANGPTL3; (-) strand; PAM type: NRG; PAM sequence: GAG
  source 1..20: mol_type = other DNA
tatacaattaggggaaatct

SEQ ID NO: 7423 - DNA, 20 bp, synthetic construct
  misc_feature 1..20: note = Description of Artificial Sequence: Synthetic oligonucleotide
  misc_feature 1..20: note = Target: ANGPTL3; (-) strand; PAM type: NRG; PAM sequence: GGG
  source 1..20: mol_type = other DNA
gatactgaatatacaattag

SEQ ID NO: 7424 - DNA, 20 bp, synthetic construct
  misc_feature 1..20: note = Description of Artificial Sequence: Synthetic oligonucleotide
  misc_feature 1..20: note = Target: ANGPTL3; (-) strand; PAM type: NRG; PAM sequence: GGG
  source 1..20: mol_type = other DNA
tgatactgaatatacaatta

SEQ ID NO: 7425 - DNA, 20 bp, synthetic construct
  misc_feature 1..20: note = Description of Artificial Sequence: Synthetic oligonucleotide
  misc_feature 1..20: note = Target: ANGPTL3; (-) strand; PAM type: NRG; PAM sequence: AGG
  source 1..20: mol_type = other DNA
atgatactgaatatacaatt

SEQ ID NO: 7426 - DNA, 20 bp, synthetic construct
  misc_feature 1..20: note = Description of Artificial Sequence: Synthetic oligonucleotide
  misc_feature 1..20: note = Target: ANGPTL3; (-) strand; PAM type: NRG; PAM sequence: TAG
  source 1..20: mol_type = other DNA
aatgatactgaatatacaat

SEQ ID NO: 7427 - DNA, 20 bp, synthetic construct
  misc_feature 1..20: note = Description of Artificial Sequence: Synthetic oligonucleotide
  misc_feature 1..20: note = Target: ANGPTL3; (-) strand; PAM type: NRG; PAM sequence: AAG
  source 1..20: mol_type = other DNA
tagtccttctgagctgataa

SEQ ID NO: 7428 - DNA, 20 bp, synthetic construct
  misc_feature 1..20: note = Description of Artificial Sequence: Synthetic oligonucleotide
  misc_feature 1..20: note = Target: ANGPTL3; (-) strand; PAM type: NRG; PAM sequence: GAG
  source 1..20: mol_type = other DNA
tcttgaatactagtccttct

SEQ ID NO: 7429 - DNA, 20 bp, synthetic construct
  misc_feature 1..20: note = Description of Artificial Sequence: Synthetic oligonucleotide
  misc_feature 1..20: note = Target: ANGPTL3; (-) strand; PAM type: NRG; PAM sequence: TAG
  source 1..20: mol_type = other DNA
ttctgtgggttcttgaatac

SEQ ID NO: 7430 - DNA, 20 bp, synthetic construct
  misc_feature 1..20: note = Description of Artificial Sequence: Synthetic oligonucleotide
  misc_feature 1..20: note = Target: ANGPTL3; (-) strand; PAM type: NRG; PAM sequence: GGG
  source 1..20: mol_type = other DNA
gaagatagagaaatttctgt

SEQ ID NO: 7431 - DNA, 20 bp, synthetic construct
  misc_feature 1..20: note = Description of Artificial Sequence: Synthetic oligonucleotide
  misc_feature 1..20: note = Target: ANGPTL3; (-) strand; PAM type: NRG; PAM sequence: TGG
  source 1..20: mol_type = other DNA
ggaagatagagaaatttctg

SEQ ID NO: 7432 - DNA, 20 bp, synthetic construct
  misc_feature 1..20: note = Description of Artificial Sequence: Synthetic oligonucleotide
  misc_feature 1..20: note = Target: ANGPTL3; (-) strand; PAM type: NRG; PAM sequence: GAG
  source 1..20: mol_type = other DNA
tgctcttggcttggaagata

SEQ ID NO: 7433 - DNA, 20 bp, synthetic construct
  misc_feature 1..20: note = Description of Artificial Sequence: Synthetic oligonucleotide
  misc_feature 1..20: note = Target: ANGPTL3; (-) strand; PAM type: NRG; PAM sequence: TAG
  source 1..20: mol_type = other DNA
ggtgctcttggcttggaaga

SEQ ID NO: 7434 - DNA, 20 bp, synthetic construct
  misc_feature 1..20: note = Description of Artificial Sequence: Synthetic oligonucleotide
  misc_feature 1..20: note = Target: ANGPTL3; (-) strand; PAM type: NRG; PAM sequence: AAG
  source 1..20: mol_type = other DNA
tcttggtgctcttggcttgg

SEQ ID NO: 7435 - DNA, 20 bp, synthetic construct
  misc_feature 1..20: note = Description of Artificial Sequence: Synthetic oligonucleotide
  misc_feature 1..20: note = Target: ANGPTL3; (-) strand; PAM type: NRG; PAM sequence: TGG
  source 1..20: mol_type = other DNA
agttcttggtgctcttggct

SEQ ID NO: 7436 - DNA, 20 bp, synthetic construct
  misc_feature 1..20: note = Description of Artificial Sequence: Synthetic oligonucleotide
  misc_feature 1..20: note = Target: ANGPTL3; (-) strand; PAM type: NRG; PAM sequence: TGG
  source 1..20: mol_type = other DNA
ggagtagttcttggtgctct

SEQ ID NO: 7437 - DNA, 20 bp, synthetic construct
  misc_feature 1..20: note = Description of Artificial Sequence: Synthetic oligonucleotide
  misc_feature 1..20: note = Target: ANGPTL3; (-) strand; PAM type: NRG; PAM sequence: TGG
  source 1..20: mol_type = other DNA
tgaagaaagggagtagttct

SEQ ID NO: 7438 - DNA, 20 bp, synthetic construct
  misc_feature 1..20: note = Description of Artificial Sequence: Synthetic oligonucleotide
  misc_feature 1..20: note = Target: ANGPTL3; (-) strand; PAM type: NRG; PAM sequence: TAG
  source 1..20: mol_type = other DNA
attcaactgaagaaagggag

SEQ ID NO: 7439 - DNA, 20 bp, synthetic construct
  misc_feature 1..20: note = Description of Artificial Sequence: Synthetic oligonucleotide
  misc_feature 1..20: note = Target: ANGPTL3; (-) strand; PAM type: NRG; PAM sequence: GAG
  source 1..20: mol_type = other DNA
ttcattcaactgaagaaagg

SEQ ID NO: 7440 - DNA, 20 bp, synthetic construct
  misc_feature 1..20: note = Description of Artificial Sequence: Synthetic oligonucleotide
  misc_feature 1..20: note = Target: ANGPTL3; (-) strand; PAM type: NRG; PAM sequence: GGG
  source 1..20: mol_type = other DNA
atttcattcaactgaagaaa

SEQ ID NO: 7441 - DNA, 20 bp, synthetic construct
  misc_feature 1..20: note = Description of Artificial Sequence: Synthetic oligonucleotide
  misc_feature 1..20: note = Target: ANGPTL3; (-) strand; PAM type: NRG; PAM sequence: AGG
  source 1..20: mol_type = other DNA
tatttcattcaactgaagaa

SEQ ID NO: 7442 - DNA, 20 bp, synthetic construct
  misc_feature 1..20: note = Description of Artificial Sequence: Synthetic oligonucleotide
  misc_feature 1..20: note = Target: ANGPTL3; (-) strand; PAM type: NRG; PAM sequence: AAG
  source 1..20: mol_type = other DNA
ttatttcattcaactgaaga

SEQ ID NO: 7443 - DNA, 20 bp, synthetic construct
  misc_feature 1..20: note = Description of Artificial Sequence: Synthetic oligonucleotide
  misc_feature 1..20: note = Target: ANGPTL3; (-) strand; PAM type: NRG; PAM sequence: AAG
  source 1..20: mol_type = other DNA
tttcttatttcattcaactg

SEQ ID NO: 7444 - DNA, 20 bp, synthetic construct
  misc_feature 1..20: note = Description of Artificial Sequence: Synthetic oligonucleotide
  misc_feature 1..20: note = Target: ANGPTL3; (-) strand; PAM type: NRG; PAM sequence: AAG
  source 1..20: mol_type = other DNA
ttcaagaaggaaacccacca

SEQ ID NO: 7445 - DNA, 20 bp, synthetic construct
  misc_feature 1..20: note = Description of Artificial Sequence: Synthetic oligonucleotide
  misc_feature 1..20: note = Target: ANGPTL3; (-) strand; PAM type: NRG; PAM sequence: AGG
  source 1..20: mol_type = other DNA
tgataataatagcttcaaga

SEQ ID NO: 7446 - DNA, 20 bp, synthetic construct
  misc_feature 1..20: note = Description of Artificial Sequence: Synthetic oligonucleotide
  misc_feature 1..20: note = Target: ANGPTL3; (-) strand; PAM type: NRG; PAM sequence: AAG
  source 1..20: mol_type = other DNA
ttgataataatagcttcaag

SEQ ID NO: 7447 - DNA, 20 bp, synthetic construct
  misc_feature 1..20: note = Description of Artificial Sequence: Synthetic oligonucleotide
  misc_feature 1..20: note = Target: ANGPTL3; (-) strand; PAM type: NRG; PAM sequence: AAG
  source 1..20: mol_type = other DNA
aatttgataataatagcttc

SEQ ID NO: 7448 - DNA, 20 bp, synthetic construct
  misc_feature 1..20: note = Description of Artificial Sequence: Synthetic oligonucleotide
  misc_feature 1..20: note = Target: ANGPTL3; (-) strand; PAM type: NRG; PAM sequence: TAG
  source 1..20: mol_type = other DNA
aatagggaatttgataataa

SEQ ID NO: 7449 - DNA, 20 bp, synthetic construct
  misc_feature 1..20: note = Description of Artificial Sequence: Synthetic oligonucleotide
  misc_feature 1..20: note = Target: ANGPTL3; (-) strand; PAM type: NRG; PAM sequence: GGG
  source 1..20: mol_type = other DNA
tagaacaagtcctaagaata

SEQ ID NO: 7450 - DNA, 20 bp, synthetic construct
  misc_feature 1..20: note = Description of Artificial Sequence: Synthetic oligonucleotide
  misc_feature 1..20: note = Target: ANGPTL3; (-) strand; PAM type: NRG; PAM sequence: AGG
  source 1..20: mol_type = other DNA
ctagaacaagtcctaagaat

SEQ ID NO: 7451 - DNA, 20 bp, synthetic construct
  misc_feature 1..20: note = Description of Artificial Sequence: Synthetic oligonucleotide
  misc_feature 1..20: note = Target: ANGPTL3; (-) strand; PAM type: NRG; PAM sequence: TAG
  source 1..20: mol_type = other DNA
tctagaacaagtcctaagaa

SEQ ID NO: 7452 - DNA, 20 bp, synthetic construct
  misc_feature 1..20: note = Description of Artificial Sequence: Synthetic oligonucleotide
  misc_feature 1..20: note = Target: ANGPTL3; (-) strand; PAM type: NRG; PAM sequence: AAG
  source 1..20: mol_type = other DNA
tttagtctagaacaagtcct

SEQ ID NO: 7453 - DNA, 20 bp, synthetic construct
  misc_feature 1..20: note = Description of Artificial Sequence: Synthetic oligonucleotide
  misc_feature 1..20: note = Target: ANGPTL3; (-) strand; PAM type: NRG; PAM sequence: AAG
  source 1..20: mol_type = other DNA
actatcttttagtctagaac

SEQ ID NO: 7454 - DNA, 20 bp, synthetic construct
  misc_feature 1..20: note = Description of Artificial Sequence: Synthetic oligonucleotide
  misc_feature 1..20: note = Target: ANGPTL3; (-) strand; PAM type: NRG; PAM sequence: TAG
  source 1..20: mol_type = other DNA
ctcttaactatcttttagtc

SEQ ID NO: 7455 - DNA, 20 bp, synthetic construct
  misc_feature 1..20: note = Description of Artificial Sequence: Synthetic oligonucleotide
  misc_feature 1..20: note = Target: ANGPTL3; (-) strand; PAM type: NRG; PAM sequence: TAG
  source 1..20: mol_type = other DNA
gatatctcttaactatcttt

SEQ ID NO: 7456 - DNA, 20 bp, synthetic construct
  misc_feature 1..20: note = Description of Artificial Sequence: Synthetic oligonucleotide
  misc_feature 1..20: note = Target: ANGPTL3; (-) strand; PAM type: NRG; PAM sequence: TGG
  source 1..20: mol_type = other DNA
ggttgatacattgtatttga

SEQ ID NO: 7457 - DNA, 20 bp, synthetic construct
  misc_feature 1..20: note = Description of Artificial Sequence: Synthetic oligonucleotide
  misc_feature 1..20: note = Target: ANGPTL3; (-) strand; PAM type: NRG; PAM sequence: AGG
  source 1..20: mol_type = other DNA
agaaccccagcatccagttt

SEQ ID NO: 7458 - DNA, 20 bp, synthetic construct
  misc_feature 1..20: note = Description of Artificial Sequence: Synthetic oligonucleotide
  misc_feature 1..20: note = Target: ANGPTL3; (-) strand; PAM type: NRG; PAM sequence: TAG
  source 1..20: mol_type = other DNA
aagaaccccagcatccagtt

SEQ ID NO: 7459 - DNA, 20 bp, synthetic construct
  misc_feature 1..20: note = Description of Artificial Sequence: Synthetic oligonucleotide
  misc_feature 1..20: note = Target: ANGPTL3; (-) strand; PAM type: NRG; PAM sequence: CAG
  source 1..20: mol_type = other DNA
gtaaaaagaaccccagcatc

SEQ ID NO: 7460 - DNA, 20 bp, synthetic construct
  misc_feature 1..20: note = Description of Artificial Sequence: Synthetic oligonucleotide
  misc_feature 1..20: note = Target: ANGPTL3; (-) strand; PAM type: NRG; PAM sequence: CAG
  source 1..20: mol_type = other DNA
atagggtgtaaaaagaaccc

SEQ ID NO: 7461 - DNA, 20 bp, synthetic construct
  misc_feature 1..20: note = Description of Artificial Sequence: Synthetic oligonucleotide
  misc_feature 1..20: note = Target: ANGPTL3; (-) strand; PAM type: NRG; PAM sequence: AAG
  source 1..20: mol_type = other DNA
tgtcttttatagggtgtaaa

SEQ ID NO: 7462 - DNA, 20 bp, synthetic construct
  misc_feature 1..20: note = Description of Artificial Sequence: Synthetic oligonucleotide
  misc_feature 1..20: note = Target: ANGPTL3; (-) strand; PAM type: NRG; PAM sequence: GGG
  source 1..20: mol_type = other DNA
tcttaggtatgtcttttata

SEQ ID NO: 7463 - DNA, 20 bp, synthetic construct
  misc_feature 1..20: note = Description of Artificial Sequence: Synthetic oligonucleotide
  misc_feature 1..20: note = Target: ANGPTL3; (-) strand; PAM type: NRG; PAM sequence: AGG
  source 1..20: mol_type = other DNA
gtcttaggtatgtcttttat

SEQ ID NO: 7464 - DNA, 20 bp, synthetic construct
  misc_feature 1..20: note = Description of Artificial Sequence: Synthetic oligonucleotide
  misc_feature 1..20: note = Target: ANGPTL3; (-) strand; PAM type: NRG; PAM sequence: TAG
  source 1..20: mol_type = other DNA
tgtcttaggtatgtctttta

SEQ ID NO: 7465 - DNA, 20 bp, synthetic construct
  misc_feature 1..20: note = Description of Artificial Sequence: Synthetic oligonucleotide
  misc_feature 1..20: note = Target: ANGPTL3; (-) strand; PAM type: NRG; PAM sequence: AGG
  source 1..20: mol_type = other DNA
tgtatttctctgattgtctt

SEQ ID NO: 7466 - DNA, 20 bp, synthetic construct
  misc_feature 1..20: note = Description of Artificial Sequence: Synthetic oligonucleotide
  misc_feature 1..20: note = Target: ANGPTL3; (-) strand; PAM type: NRG; PAM sequence: TAG
  source 1..20: mol_type = other DNA
ttgtatttctctgattgtct

SEQ ID NO: 7467 - DNA, 20 bp, synthetic construct
  misc_feature 1..20: note = Description of Artificial Sequence: Synthetic oligonucleotide
  misc_feature 1..20: note = Target: ANGPTL3; (-) strand; PAM type: NRG; PAM sequence: AAG
  source 1..20: mol_type = other DNA
ttctatattatctaataatc

SEQ ID NO: 7468 - DNA, 20 bp, synthetic construct
  misc_feature 1..20: note = Description of Artificial Sequence: Synthetic oligonucleotide
  misc_feature 1..20: note = Target: ANGPTL3; (-) strand; PAM type: NRG; PAM sequence: AAG
  source 1..20: mol_type = other DNA
gcaataccatgatcacatct

SEQ ID NO: 7469 - DNA, 20 bp, synthetic construct
  misc_feature 1..20: note = Description of Artificial Sequence: Synthetic oligonucleotide
  misc_feature 1..20: note = Target: ANGPTL3; (-) strand; PAM type: NRG; PAM sequence: GAG
  source 1..20: mol_type = other DNA
agcatgtatctcttaaacag

SEQ ID NO: 7470 - DNA, 20 bp, synthetic construct
  misc_feature 1..20: note = Description of Artificial Sequence: Synthetic oligonucleotide
  misc_feature 1..20: note = Target: ANGPTL3; (-) strand; PAM type: NRG; PAM sequence: AGG
  source 1..20: mol_type = other DNA
tcagcatgtatctcttaaac

SEQ ID NO: 7471 - DNA, 20 bp, synthetic construct
  misc_feature 1..20: note = Description of Artificial Sequence: Synthetic oligonucleotide
  misc_feature 1..20: note = Target: ANGPTL3; (-) strand; PAM type: NRG; PAM sequence: CAG
  source 1..20: mol_type = other DNA
ttcagcatgtatctcttaaa

SEQ ID NO: 7472 - DNA, 20 bp, synthetic construct
  misc_feature 1..20: note = Description of Artificial Sequence: Synthetic oligonucleotide
  misc_feature 1..20: note = Target: ANGPTL3; (-) strand; PAM type: NRG; PAM sequence: CAG
  source 1..20: mol_type = other DNA
ctttaactccgtaaatattt

SEQ ID NO: 7473 - DNA, 20 bp, synthetic construct
  misc_feature 1..20: note = Description of Artificial Sequence: Synthetic oligonucleotide
  misc_feature 1..20: note = Target: ANGPTL3; (-) strand; PAM type: NRG; PAM sequence: CAG
  source 1..20: mol_type = other DNA
tctatcaccagtctggagtc

SEQ ID NO: 7474 - DNA, 20 bp, synthetic construct
  misc_feature 1..20: note = Description of Artificial Sequence: Synthetic oligonucleotide
  misc_feature 1..20: note = Target: ANGPTL3; (-) strand; PAM type: NRG; PAM sequence: GAG
  source 1..20: mol_type = other DNA
cttgttctatcaccagtctg

SEQ ID NO: 7475 - DNA, 20 bp, synthetic construct
  misc_feature 1..20: note = Description of Artificial Sequence: Synthetic oligonucleotide
  misc_feature 1..20: note = Target: ANGPTL3; (-) strand; PAM type: NRG; PAM sequence: TGG
  source 1..20: mol_type = other DNA
gtcttgttctatcaccagtc

SEQ ID NO: 7476 - DNA, 20 bp, synthetic construct
  misc_feature 1..20: note = Description of Artificial Sequence: Synthetic oligonucleotide
  misc_feature 1..20: note = Target: ANGPTL3; (-) strand; PAM type: NRG; PAM sequence: CAG
  source 1..20: mol_type = other DNA
acagagtcttgttctatcac

SEQ ID NO: 7477 - DNA, 20 bp, synthetic construct
  misc_feature 1..20: note = Description of Artificial Sequence: Synthetic oligonucleotide
  misc_feature 1..20: note = Target: ANGPTL3; (-) strand; PAM type: NRG; PAM sequence: GAG
  source 1..20: mol_type = other DNA
ttaattattttttagagaca

SEQ ID NO: 7478 - DNA, 20 bp, synthetic construct
  misc_feature 1..20: note = Description of Artificial Sequence: Synthetic oligonucleotide
  misc_feature 1..20: note = Target: ANGPTL3; (-) strand; PAM type: NRG; PAM sequence: CAG
  source 1..20: mol_type = other DNA
aattaattattttttagaga

SEQ ID NO: 7479 - DNA, 20 bp, synthetic construct
  misc_feature 1..20: note = Description of Artificial Sequence: Synthetic oligonucleotide
  misc_feature 1..20: note = Target: ANGPTL3; (-) strand; PAM type: NRG; PAM sequence: GAG
  source 1..20: mol_type = other DNA
aaaaaattaattatttttta

SEQ ID NO: 7480 - DNA, 20 bp, synthetic construct
  misc_feature 1..20: note = Description of Artificial Sequence: Synthetic oligonucleotide
  misc_feature 1..20: note = Target: ANGPTL3; (-) strand; PAM type: NRG; PAM sequence: TAG
  source 1..20: mol_type = other DNA
ttaaaaaattaattattttt

SEQ ID NO: 7481 - DNA, 20 bp, synthetic construct
  misc_feature 1..20: note = Description of Artificial Sequence: Synthetic oligonucleotide
  misc_feature 1..20: note = Target: ANGPTL3; (-) strand; PAM type: NRG; PAM sequence: AAG
  source 1..20: mol_type = other DNA
ggcgtgttatttaagaatgt

SEQ ID NO: 7482 - DNA, 20 bp, synthetic construct
  misc_feature 1..20: note = Description of Artificial Sequence: Synthetic oligonucleotide
  misc_feature 1..20: note = Target: ANGPTL3; (-) strand; PAM type: NRG; PAM sequence: AAG
  source 1..20: mol_type = other DNA
tcttagatggcgtgttattt

SEQ ID NO: 7483 - DNA, 20 bp, synthetic construct
  misc_feature 1..20: note = Description of Artificial Sequence: Synthetic oligonucleotide
  misc_feature 1..20: note = Target: ANGPTL3; (-) strand; PAM type: NRG; PAM sequence: TGG
  source 1..20: mol_type = other DNA
gttaaagcatttttcttaga

SEQ ID NO: 7484 - DNA, 20 bp, synthetic construct
  misc_feature 1..20: note = Description of Artificial Sequence: Synthetic oligonucleotide
  misc_feature 1..20: note = Target: ANGPTL3; (-) strand; PAM type: NRG; PAM sequence: TAG
  source 1..20: mol_type = other DNA
ttatgttaaagcatttttct

SEQ ID NO: 7485 - DNA, 20 bp, synthetic construct
  misc_feature 1..20: note = Description of Artificial Sequence: Synthetic oligonucleotide
  misc_feature 1..20: note = Target: ANGPTL3; (-) strand; PAM type: NRG; PAM sequence: AAG
  source 1..20: mol_type = other DNA
tttcagtaatgtttatgtta

SEQ ID NO: 7486 - DNA, 20 bp, synthetic construct
  misc_feature 1..20: note = Description of Artificial Sequence: Synthetic oligonucleotide
  misc_feature 1..20: note = Target: ANGPTL3; (-) strand; PAM type: NRG; PAM sequence: CAG
  source 1..20: mol_type = other DNA
tggcaaatgtagcatttttt

SEQ ID NO: 7487 - DNA, 20 bp, synthetic construct
  misc_feature 1..20: note = Description of Artificial Sequence: Synthetic oligonucleotide
  misc_feature 1..20: note = Target: ANGPTL3; (-) strand; PAM type: NRG; PAM sequence: TAG
  source 1..20: mol_type = other DNA
ttatgaagttgtggcaaatg

SEQ ID NO: 7488 - DNA, 20 bp, synthetic construct
  misc_feature 1..20: note = Description of Artificial Sequence: Synthetic oligonucleotide
  misc_feature 1..20: note = Target: ANGPTL3; (-) strand; PAM type: NRG; PAM sequence: TGG
  source 1..20: mol_type = other DNA
cttgacattttatgaagttg

SEQ ID NO: 7489 - DNA, 20 bp, synthetic construct
  misc_feature 1..20: note = Description of Artificial Sequence: Synthetic oligonucleotide
  misc_feature 1..20: note = Target: ANGPTL3; (-) strand; PAM type: NRG; PAM sequence: AAG
  source 1..20: mol_type = other DNA
atttcacttgacattttatg

SEQ ID NO: 7490 - DNA, 20 bp, synthetic construct
  misc_feature 1..20: note = Description of Artificial Sequence: Synthetic oligonucleotide
  misc_feature 1..20: note = Target: ANGPTL3; (-) strand; PAM type: NRG; PAM sequence: GAG
  source 1..20: mol_type = other DNA
gaataatatctttggagctt

SEQ ID NO: 7491 - DNA, 20 bp, synthetic construct
  misc_feature 1..20: note = Description of Artificial Sequence: Synthetic oligonucleotide
  misc_feature 1..20: note = Target: ANGPTL3; (-) strand; PAM type: NRG; PAM sequence: GAG
  source 1..20: mol_type = other DNA
taataggaataatatctttg

SEQ ID NO: 7492 - DNA, 20 bp, synthetic construct
  misc_feature 1..20: note = Description of Artificial Sequence: Synthetic oligonucleotide
  misc_feature 1..20: note = Target: ANGPTL3; (-) strand; PAM type: NRG; PAM sequence: TGG
  source 1..20: mol_type = other DNA
agtaataggaataatatctt

SEQ ID NO: 7493 - DNA, 20 bp, synthetic construct
  misc_feature 1..20: note = Description of Artificial Sequence: Synthetic oligonucleotide
  misc_feature 1..20: note = Target: ANGPTL3; (-) strand; PAM type: NRG; PAM sequence: AGG
  source 1..20: mol_type = other DNA
attacatcagatttagtaat

SEQ ID NO: 7494 - DNA, 20 bp, synthetic construct
  misc_feature 1..20: note = Description of Artificial Sequence: Synthetic oligonucleotide
  misc_feature 1..20: note = Target: ANGPTL3; (-) strand; PAM type: NRG; PAM sequence: TAG
  source 1..20: mol_type = other DNA
tattacatcagatttagtaa

SEQ ID NO: 7495 - DNA, 20 bp, synthetic construct
  misc_feature 1..20: note = Description of Artificial Sequence: Synthetic oligonucleotide
  misc_feature 1..20: note = Target: ANGPTL3; (-) strand; PAM type: NRG; PAM sequence: TAG
  source 1..20: mol_type = other DNA
aaatgttattacatcagatt

SEQ ID NO: 7496 - DNA, 20 bp, synthetic construct
  misc_feature 1..20: note = Description of Artificial Sequence: Synthetic oligonucleotide
  misc_feature 1..20: note = Target: ANGPTL3; (-) strand; PAM type: NRG; PAM sequence: CAG
  source 1..20: mol_type = other DNA
tcaataaaatgttattacat

SEQ ID NO: 7497 - DNA, 20 bp, synthetic construct
  misc_feature 1..20: note = Description of Artificial Sequence: Synthetic oligonucleotide
  misc_feature 1..20: note = Target: ANGPTL3; (-) strand; PAM type: NRG; PAM sequence: TAG
  source 1..20: mol_type = other DNA
gtacattcagcaggaatgcc

SEQ ID NO: 7498 - DNA, 20 bp, synthetic construct
  misc_feature 1..20: note = Description of Artificial Sequence: Synthetic oligonucleotide
  misc_feature 1..20: note = Target: ANGPTL3; (-) strand; PAM type: NRG; PAM sequence: AGG
  source 1..20: mol_type = other DNA
taaatggtggtacattcagc

SEQ ID NO: 7499 - DNA, 20 bp, synthetic construct
  misc_feature 1..20: note = Description of Artificial Sequence: Synthetic oligonucleotide
  misc_feature 1..20: note = Target: ANGPTL3; (-) strand; PAM type: NRG; PAM sequence: CAG
  source 1..20: mol_type = other DNA
ataaatggtggtacattcag

SEQ ID NO: 7500 - DNA, 20 bp, synthetic construct
  misc_feature 1..20: note = Description of Artificial Sequence: Synthetic oligonucleotide
  misc_feature 1..20: note = Target: ANGPTL3; (-) strand; PAM type: NRG; PAM sequence: CAG
  source 1..20: mol_type = other DNA
gttataaatggtggtacatt

SEQ ID NO: 7501 - DNA, 20 bp, synthetic construct
  misc_feature 1..20: note = Description of Artificial Sequence: Synthetic oligonucleotide
  misc_feature 1..20: note = Target: ANGPTL3; (-) strand; PAM type: NRG; PAM sequence: TGG
  source 1..20: mol_type = other DNA
ttcacctctgttataaatgg

SEQ ID NO: 7502 - DNA, 20 bp, synthetic construct
  misc_feature 1..20: note = Description of Artificial Sequence: Synthetic oligonucleotide
  misc_feature 1..20: note = Target: ANGPTL3; (-) strand; PAM type: NRG; PAM sequence: TGG
  source 1..20: mol_type = other DNA
atgttcacctctgttataaa

SEQ ID NO: 7503 - DNA, 20 bp, synthetic construct
  misc_feature 1..20: note = Description of Artificial Sequence: Synthetic oligonucleotide
  misc_feature 1..20: note = Target: ANGPTL3; (-) strand; PAM type: NRG; PAM sequence: TGG
  source 1..20: mol_type = other DNA
ttgagagttgctgggtctga

SEQ ID NO: 7504 - DNA, 20 bp, synthetic construct
  misc_feature 1..20: note = Description of Artificial Sequence: Synthetic oligonucleotide
  misc_feature 1..20: note = Target: ANGPTL3; (-) strand; PAM type: NRG; PAM sequence: GGG
  source 1..20: mol_type = other DNA
tgaaaaacttgagagttgct

SEQ ID NO: 7505 - DNA, 20 bp, synthetic construct
  misc_feature 1..20: note = Description of Artificial Sequence: Synthetic oligonucleotide
  misc_feature 1..20: note = Target: ANGPTL3; (-) strand; PAM type: NRG; PAM sequence: TGG
  source 1..20: mol_type = other DNA
atgaaaaacttgagagttgc

SEQ ID NO: 7506 - DNA, 20 bp, synthetic construct
  misc_feature 1..20: note = Description of Artificial Sequence: Synthetic oligonucleotide
  misc_feature 1..20: note = Target: ANGPTL3; (-) strand; PAM type: NRG; PAM sequence: GAG
  source 1..20: mol_type = other DNA
agtagacatgaaaaacttga

SEQ ID NO: 7507 - DNA, 20 bp, synthetic construct
  misc_feature 1..20: note = Description of Artificial Sequence: Synthetic oligonucleotide
  misc_feature 1..20: note = Target: ANGPTL3; (-) strand; PAM type: NRG; PAM sequence: GAG
  source 1..20: mol_type = other DNA
acagtagacatgaaaaactt

SEQ ID NO: 7508 - DNA, 20 bp, synthetic construct
  misc_feature 1..20: note = Description of Artificial Sequence: Synthetic oligonucleotide
  misc_feature 1..20: note = Target: ANGPTL3; (-) strand; PAM type: NRG; PAM sequence: TAG
  source 1..20: mol_type = other DNA
tacctgatataacatcacag

SEQ ID NO: 7509 - DNA, 20 bp, synthetic construct
  misc_feature 1..20: note = Description of Artificial Sequence: Synthetic oligonucleotide
  misc_feature 1..20: note = Target: ANGPTL3; (-) strand; PAM type: NRG; PAM sequence: CAG
  source 1..20: mol_type = other DNA
ttttacctgatataacatca

SEQ ID NO: 7510 - DNA, 20 bp, synthetic construct
  misc_feature 1..20: note = Description of Artificial Sequence: Synthetic oligonucleotide
  misc_feature 1..20: note = Target: ANGPTL3; (-) strand; PAM type: NRG; PAM sequence: AGG
  source 1..20: mol_type = other DNA
actgtctattctccttagac

SEQ ID NO: 7511 - DNA, 20 bp, synthetic construct
  misc_feature 1..20: note = Description of Artificial Sequence: Synthetic oligonucleotide
  misc_feature 1..20: note = Target: ANGPTL3; (-) strand; PAM type: NRG; PAM sequence: CAG
  source 1..20: mol_type = other DNA
tactgtctattctccttaga

SEQ ID NO: 7512 - DNA, 20 bp, synthetic construct
  misc_feature 1..20: note = Description of Artificial Sequence: Synthetic oligonucleotide
  misc_feature 1..20: note = Target: ANGPTL3; (-) strand; PAM type: NRG; PAM sequence: TAG
  source 1..20: mol_type = other DNA
taactactgtctattctcct

SEQ ID NO: 7513 - DNA, 20 bp, synthetic construct
  misc_feature 1..20: note = Description of Artificial Sequence: Synthetic oligonucleotide
  misc_feature 1..20: note = Target: ANGPTL3; (-) strand; PAM type: NRG; PAM sequence: AAG
  source 1..20: mol_type = other DNA
cttcctaatacgtaatgagt

SEQ ID NO: 7514 - DNA, 20 bp, synthetic construct
  misc_feature 1..20: note = Description of Artificial Sequence: Synthetic oligonucleotide
  misc_feature 1..20: note = Target: ANGPTL3; (-) strand; PAM type: NRG; PAM sequence: GAG
  source 1..20: mol_type = other DNA
taatcttcctaatacgtaat

SEQ ID NO: 7515 - DNA, 20 bp, synthetic construct
  misc_feature 1..20: note = Description of Artificial Sequence: Synthetic oligonucleotide
  misc_feature 1..20: note = Target: ANGPTL3; (-) strand; PAM type: NRG; PAM sequence: AGG
  source 1..20: mol_type = other DNA
tgtataaaacaatgataacc

SEQ ID NO: 7516 - DNA, 20 bp, synthetic construct
  misc_feature 1..20: note = Description of Artificial Sequence: Synthetic oligonucleotide
  misc_feature 1..20: note = Target: ANGPTL3; (-) strand; PAM type: NRG; PAM sequence: CAG
  source 1..20: mol_type = other DNA
atgtataaaacaatgataac

SEQ ID NO: 7517 - DNA, 20 bp, synthetic construct
  misc_feature 1..20: note = Description of Artificial Sequence: Synthetic oligonucleotide
  misc_feature 1..20: note = Target: ANGPTL3; (-) strand; PAM type: NRG; PAM sequence: AAG
  source 1..20: mol_type = other DNA
taaatacataaacaaggtaa

SEQ ID NO: 7518 - DNA, 20 bp, synthetic construct
  misc_feature 1..20: note = Description of Artificial Sequence: Synthetic oligonucleotide
  misc_feature 1..20: note = Target: ANGPTL3; (-) strand; PAM type: NRG; PAM sequence: AGG
  source 1..20: mol_type = other DNA
attgagtaaatacataaaca

SEQ ID NO: 7519 - DNA, 20 bp, synthetic construct
  misc_feature 1..20: note = Description of Artificial Sequence: Synthetic oligonucleotide
  misc_feature 1..20: note = Target: ANGPTL3; (-) strand; PAM type: NRG; PAM sequence: AAG
  source 1..20: mol_type = other DNA
tattgagtaaatacataaac

SEQ ID NO: 7520 - DNA, 20 bp, synthetic construct
  misc_feature 1..20: note = Description of Artificial Sequence: Synthetic oligonucleotide
  misc_feature 1..20: note = Target: ANGPTL3; (-) strand; PAM type: NRG; PAM sequence: GAG
  source 1..20: mol_type = other DNA
tagaggaaaaggagaatatt

SEQ ID NO: 7521 - DNA, 20 bp, synthetic construct
  misc_feature 1..20: note = Description of Artificial Sequence: Synthetic oligonucleotide
  misc_feature 1..20: note = Target: ANGPTL3; (-) strand; PAM type: NRG; PAM sequence: GAG
  source 1..20: mol_type = other DNA
agattattttagaggaaaag

SEQ ID NO: 7522 - DNA, 20 bp, synthetic construct
  misc_feature 1..20: note = Description of Artificial Sequence: Synthetic oligonucleotide
  misc_feature 1..20: note = Target: ANGPTL3; (-) strand; PAM type: NRG; PAM sequence: AGG
  source 1..20: mol_type = other DNA
tcagattattttagaggaaa

SEQ ID NO: 7523 - DNA, 20 bp, synthetic construct
  misc_feature 1..20: note = Description of Artificial Sequence: Synthetic oligonucleotide
  misc_feature 1..20: note = Target: ANGPTL3; (-) strand; PAM type: NRG; PAM sequence: AAG
  source 1..20: mol_type = other DNA
ttcagattattttagaggaa

SEQ ID NO: 7524 - DNA, 20 bp, synthetic construct
  misc_feature 1..20: note = Description of Artificial Sequence: Synthetic oligonucleotide
  misc_feature 1..20: note = Target: ANGPTL3; (-) strand; PAM type: NRG; PAM sequence: AGG
  source 1..20: mol_type = other DNA
gtcacttcagattattttag

SEQ ID NO: 7525 - DNA, 20 bp, synthetic construct
  misc_feature 1..20: note = Description of Artificial Sequence: Synthetic oligonucleotide
  misc_feature 1..20: note = Target: ANGPTL3; (-) strand; PAM type: NRG; PAM sequence: GAG
  source 1..20: mol_type = other DNA
agtcacttcagattatttta

SEQ ID NO: 7526 - DNA, 20 bp, synthetic construct
  misc_feature 1..20: note = Description of Artificial Sequence: Synthetic oligonucleotide
  misc_feature 1..20: note = Target: ANGPTL3; (-) strand; PAM type: NRG; PAM sequence: TAG
  source 1..20: mol_type = other DNA
atagtcacttcagattattt

SEQ ID NO: 7527 - DNA, 20 bp, synthetic construct
  misc_feature 1..20: note = Description of Artificial Sequence: Synthetic oligonucleotide
  misc_feature 1..20: note = Target: ANGPTL3; (-) strand; PAM type: NRG; PAM sequence: CAG
  source 1..20: mol_type = other DNA
cttattgataatagtcactt

SEQ ID NO: 7528 - DNA, 20 bp, synthetic construct
  misc_feature 1..20: note = Description of Artificial Sequence: Synthetic oligonucleotide
  misc_feature 1..20: note = Target: ANGPTL3; (-) strand; PAM type: NRG; PAM sequence: TAG
  source 1..20: mol_type = other DNA
catagtaaacttattgataa

SEQ ID NO: 7529 - DNA, 20 bp, synthetic construct
  misc_feature 1..20: note = Description of Artificial Sequence: Synthetic oligonucleotide
  misc_feature 1..20: note = Target: ANGPTL3; (-) strand; PAM type: NRG; PAM sequence: TAG
  source 1..20: mol_type = other DNA
gcaattaatgaattttggca

SEQ ID NO: 7530 - DNA, 20 bp, synthetic construct
  misc_feature 1..20: note = Description of Artificial Sequence: Synthetic oligonucleotide
  misc_feature 1..20: note = Target: ANGPTL3; (-) strand; PAM type: NRG; PAM sequence: TGG
  source 1..20: mol_type = other DNA
gaaaggcaattaatgaattt

SEQ ID NO: 7531 - DNA, 20 bp, synthetic construct
  misc_feature 1..20: note = Description of Artificial Sequence: Synthetic oligonucleotide
  misc_feature 1..20: note = Target: ANGPTL3; (-) strand; PAM type: NRG; PAM sequence: AGG
  source 1..20: mol_type = other DNA
ggtcccaaaagttaagtgaa

SEQ ID NO: 7532 - DNA, 20 bp, synthetic construct
  misc_feature 1..20: note = Description of Artificial Sequence: Synthetic oligonucleotide
  misc_feature 1..20: note = Target: ANGPTL3; (-) strand; PAM type: NRG; PAM sequence: AAG
  source 1..20: mol_type = other DNA
tggtcccaaaagttaagtga

SEQ ID NO: 7533 - DNA, 20 bp, synthetic construct
  misc_feature 1..20: note = Description of Artificial Sequence: Synthetic oligonucleotide
  misc_feature 1..20: note = Target: ANGPTL3; (-) strand; PAM type: NRG; PAM sequence: AAG
  source 1..20: mol_type = other DNA
ttattatggtcccaaaagtt

SEQ ID NO: 7534 - DNA, 20 bp, synthetic construct
  misc_feature 1..20: note = Description of Artificial Sequence: Synthetic oligonucleotide
  misc_feature 1..20: note = Target: ANGPTL3; (-) strand; PAM type: NRG; PAM sequence: AAG
  source 1..20: mol_type = other DNA
attatttattatggtcccaa

SEQ ID NO: 7535 - DNA, 20 bp, synthetic construct
  misc_feature 1..20: note = Description of Artificial Sequence: Synthetic oligonucleotide
  misc_feature 1..20: note = Target: ANGPTL3; (-) strand; PAM type: NRG; PAM sequence: TGG
  source 1..20: mol_type = other DNA
atacattttattatttatta

SEQ ID NO: 7536 - DNA, 20 bp, synthetic construct
  misc_feature 1..20: note = Description of Artificial Sequence: Synthetic oligonucleotide
  misc_feature 1..20: note = Target: ANGPTL3; (-) strand; PAM type: NRG; PAM sequence: TGG
  source 1..20: mol_type = other DNA
aaggtagtttattaatgtta

SEQ ID NO: 7537 - DNA, 20 bp, synthetic construct
  misc_feature 1..20: note = Description of Artificial Sequence: Synthetic oligonucleotide
  misc_feature 1..20: note = Target: ANGPTL3; (-) strand; PAM type: NRG; PAM sequence: TAG
  source 1..20: mol_type = other DNA
taattggtggttttgtaagg

SEQ ID NO: 7538 - DNA, 20 bp, synthetic construct
  misc_feature 1..20: note = Description of Artificial Sequence: Synthetic oligonucleotide
  misc_feature 1..20: note = Target: ANGPTL3; (-) strand; PAM type: NRG; PAM sequence: AGG
  source 1..20: mol_type = other DNA
ttttaattggtggttttgta

SEQ ID NO: 7539 - DNA, 20 bp, synthetic construct
  misc_feature 1..20: note = Description of Artificial Sequence: Synthetic oligonucleotide
  misc_feature 1..20: note = Target: ANGPTL3; (-) strand; PAM type: NRG; PAM sequence: AAG
  source 1..20: mol_type = other DNA
attttaattggtggttttgt

SEQ ID NO: 7540 - DNA, 20 bp, synthetic construct
  misc_feature 1..20: note = Description of Artificial Sequence: Synthetic oligonucleotide
  misc_feature 1..20: note = Target: ANGPTL3; (-) strand; PAM type: NRG; PAM sequence: TGG
  source 1..20: mol_type = other DNA
gtttgtttgattttaattgg

SEQ ID NO: 7541 - DNA, 20 bp, synthetic construct
  misc_feature 1..20: note = Description of Artificial Sequence: Synthetic oligonucleotide
  misc_feature 1..20: note = Target: ANGPTL3; (-) strand; PAM type: NRG; PAM sequence: TGG
  source 1..20: mol_type = other DNA
tttgtttgtttgattttaat

SEQ ID NO: 7542 - DNA, 20 bp, synthetic construct
  misc_feature 1..20: note = Description of Artificial Sequence: Synthetic oligonucleotide
  misc_feature 1..20: note = Target: ANGPTL3; (-) strand; PAM type: NRG; PAM sequence: CAG
  source 1..20: mol_type = other DNA
ttttagtagatttatgttga

SEQ ID NO: 7543 - DNA, 20 bp, synthetic construct
  misc_feature 1..20: note = Description of Artificial Sequence: Synthetic oligonucleotide
  misc_feature 1..20: note = Target: ANGPTL3; (-) strand; PAM type: NRG; PAM sequence: TAG
  source 1..20: mol_type = other DNA
atgaaatcatgtatttttag

SEQ ID NO: 7544 - DNA, 20 bp, synthetic construct
  misc_feature 1..20: note = Description of Artificial Sequence: Synthetic oligonucleotide
  misc_feature 1..20: note = Target: ANGPTL3; (-) strand; PAM type: NRG; PAM sequence: TAG
  source 1..20: mol_type = other DNA
tgaatgaaatcatgtatttt

SEQ ID NO: 7545 - DNA, 20 bp, synthetic construct
  misc_feature 1..20: note = Description of Artificial Sequence: Synthetic oligonucleotide
  misc_feature 1..20: note = Target: ANGPTL3; (-) strand; PAM type: NRG; PAM sequence: TGG
  source 1..20: mol_type = other DNA
cgatgttgaattaatgtcca

SEQ ID NO: 7546 - DNA, 20 bp, synthetic construct
  misc_feature 1..20: note = Description of Artificial Sequence: Synthetic oligonucleotide
  misc_feature 1..20: note = Target: ANGPTL3; (-) strand; PAM type: NRG; PAM sequence: AAG
  source 1..20: mol_type = other DNA
agttctcccacgtttcattg

SEQ ID NO: 7547 - DNA, 20 bp, synthetic construct
  misc_feature 1..20: note = Description of Artificial Sequence: Synthetic oligonucleotide
  misc_feature 1..20: note = Target: ANGPTL3; (-) strand; PAM type: NRG; PAM sequence: TAG
  source 1..20: mol_type = other DNA
gcctcccaaaaccatatttg

SEQ ID NO: 7548 - DNA, 20 bp, synthetic construct
  misc_feature 1..20: note = Description of Artificial Sequence: Synthetic oligonucleotide
  misc_feature 1..20: note = Target: ANGPTL3; (-) strand; PAM type: NRG; PAM sequence: AAG
  source 1..20: mol_type = other DNA
aatgtagtccccttaccatc

SEQ ID NO: 7549 - DNA, 20 bp, synthetic construct
  misc_feature 1..20: note = Description of Artificial Sequence: Synthetic oligonucleotide
  misc_feature 1..20: note = Target: ANGPTL3; (-) strand; PAM type: NRG; PAM sequence: TAG
  source 1..20: mol_type = other DNA
agtgaatgaatgattgaatg

SEQ ID NO: 7550 - DNA, 20 bp, synthetic construct
  misc_feature 1..20: note = Description of Artificial Sequence: Synthetic oligonucleotide
  misc_feature 1..20: note = Target: ANGPTL3; (-) strand; PAM type: NRG; PAM sequence: AAG
  source 1..20: mol_type = other DNA
gtaaatatttgtagattagc

SEQ ID NO: 7551 - DNA, 20 bp, synthetic construct
  misc_feature 1..20: note = Description of Artificial Sequence: Synthetic oligonucleotide
  misc_feature 1..20: note = Target: ANGPTL3; (-) strand; PAM type: NRG; PAM sequence: TAG
  source 1..20: mol_type = other DNA
ctcagtaaatatttgtagat

SEQ ID NO: 7552 - DNA, 20 bp, synthetic construct
  misc_feature 1..20: note = Description of Artificial Sequence: Synthetic oligonucleotide
  misc_feature 1..20: note = Target: ANGPTL3; (-) strand; PAM type: NRG; PAM sequence: TAG
  source 1..20: mol_type = other DNA
aggttctcagtaaatatttg

SEQ ID NO: 7553 - DNA, 20 bp, synthetic construct
  misc_feature 1..20: note = Description of Artificial Sequence: Synthetic oligonucleotide
  misc_feature 1..20: note = Target: ANGPTL3; (-) strand; PAM type: NRG; PAM sequence: CAG
  source 1..20: mol_type = other DNA
cctggtccataagaggttct

SEQ ID NO: 7554 - DNA, 20 bp, synthetic construct
  misc_feature 1..20: note = Description of Artificial Sequence: Synthetic oligonucleotide
  misc_feature 1..20: note = Target: ANGPTL3; (-) strand; PAM type: NRG; PAM sequence: AGG
  source 1..20: mol_type = other DNA
cctaatacctggtccataag

SEQ ID NO: 7555 - DNA, 20 bp, synthetic construct
  misc_feature 1..20: note = Description of Artificial Sequence: Synthetic oligonucleotide
  misc_feature 1..20: note = Target: ANGPTL3; (-) strand; PAM type: NRG; PAM sequence: GAG
  source 1..20: mol_type = other DNA
tcctaatacctggtccataa

SEQ ID NO: 7556 - DNA, 20 bp, synthetic construct
  misc_feature 1..20: note = Description of Artificial Sequence: Synthetic oligonucleotide
  misc_feature 1..20: note = Target: ANGPTL3; (-) strand; PAM type: NRG; PAM sequence: AAG
  source 1..20: mol_type = other DNA
tttcctaatacctggtccat

SEQ ID NO: 7557 - DNA, 20 bp, synthetic construct
  misc_feature 1..20: note = Description of Artificial Sequence: Synthetic oligonucleotide
  misc_feature 1..20: note = Target: ANGPTL3; (-) strand; PAM type: NRG; PAM sequence: TGG
  source 1..20: mol_type = other DNA
ttactacttttcctaatacc

SEQ ID NO: 7558 - DNA, 20 bp, synthetic construct
  misc_feature 1..20: note = Description of Artificial Sequence: Synthetic oligonucleotide
  misc_feature 1..20: note = Target: ANGPTL3; (-) strand; PAM type: NRG; PAM sequence: GAG
  source 1..20: mol_type = other DNA
taataaattatatgaaggct

SEQ ID NO: 7559 - DNA, 20 bp, synthetic construct
  misc_feature 1..20: note = Description of Artificial Sequence: Synthetic oligonucleotide
  misc_feature 1..20: note = Target: ANGPTL3; (-) strand; PAM type: NRG; PAM sequence: AGG
  source 1..20: mol_type = other DNA
tttgataataaattatatga

SEQ ID NO: 7560 - DNA, 20 bp, synthetic construct
  misc_feature 1..20: note = Description of Artificial Sequence: Synthetic oligonucleotide
  misc_feature 1..20: note = Target: ANGPTL3; (-) strand; PAM type: NRG; PAM sequence: AAG
  source 1..20: mol_type = other DNA
gtttgataataaattatatg

SEQ ID NO: 7561 - DNA, 20 bp, synthetic construct
  misc_feature 1..20: note = Description of Artificial Sequence: Synthetic oligonucleotide
  misc_feature 1..20: note = Target: ANGPTL3; (-) strand; PAM type: NRG; PAM sequence: AAG
  source 1..20: mol_type = other DNA
caaataataacagttgtaat

SEQ ID NO: 7562 - DNA, 20 bp, synthetic construct
  misc_feature 1..20: note = Description of Artificial Sequence: Synthetic oligonucleotide
  misc_feature 1..20: note = Target: ANGPTL3; (-) strand; PAM type: NRG; PAM sequence: CAG
  source 1..20: mol_type = other DNA
aaatataattcaaataataa

SEQ ID NO: 7563 - DNA, 20 bp, synthetic construct
  misc_feature 1..20: note = Description of Artificial Sequence: Synthetic oligonucleotide
  misc_feature 1..20: note = Target: ANGPTL3; (-) strand; PAM type: NRG; PAM sequence: CAG
  source 1..20: mol_type = other DNA
gtgataagtatatttaagaa

SEQ ID NO: 7564 - DNA, 20 bp, synthetic construct
  misc_feature 1..20: note = Description of Artificial Sequence: Synthetic oligonucleotide
  misc_feature 1..20: note = Target: ANGPTL3; (-) strand; PAM type: NRG; PAM sequence: AAG
  source 1..20: mol_type = other DNA
aaattgtgataagtatattt

SEQ ID NO: 7565 - DNA, 20 bp, synthetic construct
  misc_feature 1..20: note = Description of Artificial Sequence: Synthetic oligonucleotide
  misc_feature 1..20: note = Target: ANGPTL3; (-) strand; PAM type: NRG; PAM sequence: AAG
  source 1..20: mol_type = other DNA
ccgtggaattaaattgtgat

SEQ ID NO: 7566 - DNA, 20 bp, synthetic construct
  misc_feature 1..20: note = Description of Artificial Sequence: Synthetic oligonucleotide
  misc_feature 1..20: note = Target: ANGPTL3; (-) strand; PAM type: NRG; PAM sequence: TGG
  source 1..20: mol_type = other DNA
gttatgatcattgtaagccg

SEQ ID NO: 7567 - DNA, 20 bp, synthetic construct
  misc_feature 1..20: note = Description of Artificial Sequence: Synthetic oligonucleotide
  misc_feature 1..20: note = Target: ANGPTL3; (-) strand; PAM type: NRG; PAM sequence: AAG
  source 1..20: mol_type = other DNA
attatagttatgatcattgt

SEQ ID NO: 7568 - DNA, 20 bp, synthetic construct
  misc_feature 1..20: note = Description of Artificial Sequence: Synthetic oligonucleotide
  misc_feature 1..20: note = Target: ANGPTL3; (-) strand; PAM type: NRG; PAM sequence: TAG
  source 1..20: mol_type = other DNA
aaaattgtctttaataatta

SEQ ID NO: 7569 - DNA, 20 bp, synthetic construct
  misc_feature 1..20: note = Description of Artificial Sequence: Synthetic oligonucleotide
  misc_feature 1..20: note = Target: ANGPTL3; (-) strand; PAM type: NRG; PAM sequence: CAG
  source 1..20: mol_type = other DNA
ttttcacagcttatttgtaa

SEQ ID NO: 7570 - DNA, 20 bp, synthetic construct
  misc_feature 1..20: note = Description of Artificial Sequence: Synthetic oligonucleotide
  misc_feature 1..20: note = Target: ANGPTL3; (-) strand; PAM type: NRG; PAM sequence: CAG
  source 1..20: mol_type = other DNA
gctaggagtggttcttttca

SEQ ID NO: 7571 - DNA, 20 bp, synthetic construct
  misc_feature 1..20: note = Description of Artificial Sequence: Synthetic oligonucleotide
  misc_feature 1..20: note = Target: ANGPTL3; (-) strand; PAM type: NRG; PAM sequence: TGG
  source 1..20: mol_type = other DNA
agagtgactaatgctaggag

SEQ ID NO: 7572 - DNA, 20 bp, synthetic construct
  misc_feature 1..20: note = Description of Artificial Sequence: Synthetic oligonucleotide
  misc_feature 1..20: note = Target: ANGPTL3; (-) strand; PAM type: NRG; PAM sequence: GAG
  source 1..20: mol_type = other DNA
aatagagtgactaatgctag

SEQ ID NO: 7573 - DNA, 20 bp, synthetic construct
  misc_feature 1..20: note = Description of Artificial Sequence: Synthetic oligonucleotide
  misc_feature 1..20: note = Target: ANGPTL3; (-) strand; PAM type: NRG; PAM sequence: AGG
  source 1..20: mol_type = other DNA
agaatagagtgactaatgct

SEQ ID NO: 7574 - DNA, 20 bp, synthetic construct
  misc_feature 1..20: note = Description of Artificial Sequence: Synthetic oligonucleotide
  misc_feature 1..20: note = Target: ANGPTL3; (-) strand; PAM type: NRG; PAM sequence: TAG
  source 1..20: mol_type = other DNA
gagaatagagtgactaatgc

SEQ ID NO: 7575 - DNA, 20 bp, synthetic construct
  misc_feature 1..20: note = Description of Artificial Sequence: Synthetic oligonucleotide
  misc_feature 1..20: note = Target: ANGPTL3; (-) strand; PAM type: NRG; PAM sequence: GAG
  source 1..20: mol_type = other DNA
aaaacgttaatgagagaata

SEQ ID NO: 7576 - DNA, 20 bp, synthetic construct
  misc_feature 1..20: note = Description of Artificial Sequence: Synthetic oligonucleotide
  misc_feature 1..20: note = Target: ANGPTL3; (-) strand; PAM type: NRG; PAM sequence: TAG
  source 1..20: mol_type = other DNA
gtaaaacgttaatgagagaa

SEQ ID NO: 7577 - DNA, 20 bp, synthetic construct
  misc_feature 1..20: note = Description of Artificial Sequence: Synthetic oligonucleotide
  misc_feature 1..20: note = Target: ANGPTL3; (-) strand; PAM type: NRG; PAM sequence: GAG
  source 1..20: mol_type = other DNA
gatatgtaaaacgttaatga

SEQ ID NO: 7578 - DNA, 20 bp, synthetic construct
  misc_feature 1..20: note = Description of Artificial Sequence: Synthetic oligonucleotide
  misc_feature 1..20: note = Target: ANGPTL3; (-) strand; PAM type: NRG; PAM sequence: GAG
  source 1..20: mol_type = other DNA
ttgatatgtaaaacgttaat

SEQ ID NO: 7579 - DNA, 20 bp, synthetic construct
  misc_feature 1..20: note = Description of Artificial Sequence: Synthetic oligonucleotide
  misc_feature 1..20: note = Target: ANGPTL3; (-) strand; PAM type: NRG; PAM sequence: TGG
  source 1..20: mol_type = other DNA
tactgtatgtctgagtttcc

SEQ ID NO: 7580 - DNA, 20 bp, synthetic construct
  misc_feature 1..20: note = Description of Artificial Sequence: Synthetic oligonucleotide
  misc_feature 1..20: note = Target: ANGPTL3; (-) strand; PAM type: NRG; PAM sequence: GAG
  source 1..20: mol_type = other DNA
aaaatgtatactgtatgtct

SEQ ID NO: 7581 - DNA, 20 bp, synthetic construct
  misc_feature 1..20: note = Description of Artificial Sequence: Synthetic oligonucleotide
  misc_feature 1..20: note = Target: ANGPTL3; (-) strand; PAM type: NRG; PAM sequence: AAG
  source 1..20: mol_type = other DNA
tgagttaactaattcattat

SEQ ID NO: 7582 - DNA, 20 bp, synthetic construct
  misc_feature 1..20: note = Description of Artificial Sequence: Synthetic oligonucleotide
  misc_feature 1..20: note = Target: ANGPTL3; (-) strand; PAM type: NRG; PAM sequence: GAG
  source 1..20: mol_type = other DNA
aaaatagaataatttgcatt

SEQ ID NO: 7583 - DNA, 20 bp, synthetic construct
  misc_feature 1..20: note = Description of Artificial Sequence: Synthetic oligonucleotide
  misc_feature 1..20: note = Target: ANGPTL3; (-) strand; PAM type: NRG; PAM sequence: TAG
  source 1..20: mol_type = other DNA
tttactatttgtaatcaaaa

SEQ ID NO: 7584 - DNA, 20 bp, synthetic construct
  misc_feature 1..20: note = Description of Artificial Sequence: Synthetic oligonucleotide
  misc_feature 1..20: note = Target: ANGPTL3; (-) strand; PAM type: NRG; PAM sequence: TGG
  source 1..20: mol_type = other DNA
ggatttttgtatgtgctttt

SEQ ID NO: 7585 - DNA, 20 bp, synthetic construct
  misc_feature 1..20: note = Description of Artificial Sequence: Synthetic oligonucleotide
  misc_feature 1..20: note = Target: ANGPTL3; (-) strand; PAM type: NRG; PAM sequence: TGG
  source 1..20: mol_type = other DNA
gagtacttagacatcattca

SEQ ID NO: 7586 - DNA, 20 bp, synthetic construct
  misc_feature 1..20: note = Description of Artificial Sequence: Synthetic oligonucleotide
  misc_feature 1..20: note = Target: ANGPTL3; (-) strand; PAM type: NRG; PAM sequence: TAG
  source 1..20: mol_type = other DNA
ctactttataagtgagtact

SEQ ID NO: 7587 - DNA, 20 bp, synthetic construct
  misc_feature 1..20: note = Description of Artificial Sequence: Synthetic oligonucleotide
  misc_feature 1..20: note = Target: ANGPTL3; (-) strand; PAM type: NRG; PAM sequence: GAG
  source 1..20: mol_type = other DNA
atgtcttctactttataagt

SEQ ID NO: 7588 - DNA, 20 bp, synthetic construct
  misc_feature 1..20: note = Description of Artificial Sequence: Synthetic oligonucleotide
  misc_feature 1..20: note = Target: ANGPTL3; (-) strand; PAM type: NRG; PAM sequence: AAG
  source 1..20: mol_type = other DNA
atgaatgtcttctactttat

SEQ ID NO: 7589 - DNA, 20 bp, synthetic construct
  misc_feature 1..20: note = Description of Artificial Sequence: Synthetic oligonucleotide
  misc_feature 1..20: note = Target: ANGPTL3; (-) strand; PAM type: NRG; PAM sequence: GAG
  source 1..20: mol_type = other DNA
ttaaatggtcaaatagtact

SEQ ID NO: 7590 - DNA, 20 bp, synthetic construct
  misc_feature 1..20: note = Description of Artificial Sequence: Synthetic oligonucleotide
  misc_feature 1..20: note = Target: ANGPTL3; (-) strand; PAM type: NRG; PAM sequence: TAG
  source 1..20: mol_type = other DNA
aaaatttttaaatggtcaaa

SEQ ID NO: 7591 - DNA, 20 bp, synthetic construct
  misc_feature 1..20: note = Description of Artificial Sequence: Synthetic oligonucleotide
  misc_feature 1..20: note = Target: ANGPTL3; (-) strand; PAM type: NRG; PAM sequence: TGG
  source 1..20: mol_type = other DNA
ttgaatacaaaatttttaaa

SEQ ID NO: 7592 - DNA, 20 bp, synthetic construct
  misc_feature 1..20: note = Description of Artificial Sequence: Synthetic oligonucleotide
  misc_feature 1..20: note = Target: ANGPTL3; (-) strand; PAM type: NRG; PAM sequence: TAG
  source 1..20: mol_type = other DNA
ctaggtagggctttcactgg

SEQ ID NO: 7593 - DNA, 20 bp, synthetic construct
  misc_feature 1..20: note = Description of Artificial Sequence: Synthetic oligonucleotide
  misc_feature 1..20: note = Target: ANGPTL3; (-) strand; PAM type: NRG; PAM sequence: TGG
  source 1..20: mol_type = other DNA
cttctaggtagggctttcac

SEQ ID NO: 7594 - DNA, 20 bp, synthetic construct
  misc_feature 1..20: note = Description of Artificial Sequence: Synthetic oligonucleotide
  misc_feature 1..20: note = Target: ANGPTL3; (-) strand; PAM type: NRG; PAM sequence: GGG
  source 1..20: mol_type = other DNA
ctgagtataccttctaggta

SEQ ID NO: 7595 - DNA, 20 bp, synthetic construct
  misc_feature 1..20: note = Description of Artificial Sequence: Synthetic oligonucleotide
  misc_feature 1..20: note = Target: ANGPTL3; (-) strand; PAM type: NRG; PAM sequence: AGG
  source 1..20: mol_type = other DNA
actgagtataccttctaggt

SEQ ID NO: 7596 - DNA, 20 bp, synthetic construct
  misc_feature 1..20: note = Description of Artificial Sequence: Synthetic oligonucleotide
  misc_feature 1..20: note = Target: ANGPTL3; (-) strand; PAM type: NRG; PAM sequence: TAG
  source 1..20: mol_type = other DNA
cactgagtataccttctagg

SEQ ID NO: 7597 - DNA, 20 bp, synthetic construct
  misc_feature 1..20: note = Description of Artificial Sequence: Synthetic oligonucleotide
  misc_feature 1..20: note = Target: ANGPTL3; (-) strand; PAM type: NRG; PAM sequence: AGG
  source 1..20: mol_type = other DNA
tatcactgagtataccttct

SEQ ID NO: 7598 - DNA, 20 bp, synthetic construct
  misc_feature 1..20: note = Description of Artificial Sequence: Synthetic oligonucleotide
  misc_feature 1..20: note = Target: ANGPTL3; (-) strand; PAM type: NRG; PAM sequence: TAG
  source 1..20: mol_type = other DNA
ttatcactgagtataccttc

SEQ ID NO: 7599 - DNA, 20 bp, synthetic construct
  misc_feature 1..20: note = Description of Artificial Sequence: Synthetic oligonucleotide
  misc_feature 1..20: note = Target: ANGPTL3; (-) strand; PAM type: NRG; PAM sequence: GAG
  source 1..20: mol_type = other DNA
gagctacaaaacttatcact

SEQ ID NO: 7600 - DNA, 20 bp, synthetic construct
  misc_feature 1..20: note = Description of Artificial Sequence: Synthetic oligonucleotide
  misc_feature 1..20: note = Target: ANGPTL3; (-) strand; PAM type: NRG; PAM sequence: GAG
  source 1..20: mol_type = other DNA
actcactattagaagatttg

SEQ ID NO: 7601 - DNA, 20 bp, synthetic construct
  misc_feature 1..20: note = Description of Artificial Sequence: Synthetic oligonucleotide
  misc_feature 1..20: note = Target: ANGPTL3; (-) strand; PAM type: NRG; PAM sequence: TGG
  source 1..20: mol_type = other DNA
acactcactattagaagatt

SEQ ID NO: 7602 - DNA, 20 bp, synthetic construct
  misc_feature 1..20: note = Description of Artificial Sequence: Synthetic oligonucleotide
  misc_feature 1..20: note = Target: ANGPTL3; (-) strand; PAM type: NRG; PAM sequence: AAG
  source 1..20: mol_type = other DNA
ggggttacactcactattag

SEQ ID NO: 7603 - DNA, 20 bp, synthetic construct
  misc_feature 1..20: note = Description of Artificial Sequence: Synthetic oligonucleotide
  misc_feature 1..20: note = Target: ANGPTL3; (-) strand; PAM type: NRG; PAM sequence: TAG
  source 1..20: mol_type = other DNA
tttggggttacactcactat

SEQ ID NO: 7604 - DNA, 20 bp, synthetic construct
  misc_feature 1..20: note = Description of Artificial Sequence: Synthetic oligonucleotide
  misc_feature 1..20: note = Target: ANGPTL3; (-) strand; PAM type: NRG; PAM sequence: GGG
  source 1..20: mol_type = other DNA
cctgtcagccttttattttg

SEQ ID NO: 7605 - DNA, 20 bp, synthetic construct
  misc_feature 1..20: note = Description of Artificial Sequence: Synthetic oligonucleotide
  misc_feature 1..20: note = Target: ANGPTL3; (-) strand; PAM type: NRG; PAM sequence: GGG
  source 1..20: mol_type = other DNA
acctgtcagccttttatttt

SEQ ID NO: 7606 - DNA, 20 bp, synthetic construct
  misc_feature 1..20: note = Description of Artificial Sequence: Synthetic oligonucleotide
  misc_feature 1..20: note = Target: ANGPTL3; (-) strand; PAM type: NRG; PAM sequence: TGG
  source 1..20: mol_type = other DNA
tacctgtcagccttttattt

SEQ ID NO: 7607 - DNA, 20 bp, synthetic construct
  misc_feature 1..20: note = Description of Artificial Sequence: Synthetic oligonucleotide
  misc_feature 1..20: note = Target: ANGPTL3; (-) strand; PAM type: NRG; PAM sequence: CAG
  source 1..20: mol_type = other DNA
agtattctcgacttacctgt

SEQ ID NO: 7608 - DNA, 20 bp, synthetic construct
  misc_feature 1..20: note = Description of Artificial Sequence: Synthetic oligonucleotide
  misc_feature 1..20: note = Target: ANGPTL3; (-) strand; PAM type: NRG; PAM sequence: GAG
  source 1..20: mol_type = other DNA
ctttcttaccagaattaagt

SEQ ID NO: 7609 - DNA, 20 bp, synthetic construct
  misc_feature 1..20: note = Description of Artificial Sequence: Synthetic oligonucleotide
  misc_feature 1..20: note = Target: ANGPTL3; (-) strand; PAM type: NRG; PAM sequence: AAG
  source 1..20: mol_type = other DNA
gttgctttcttaccagaatt

SEQ ID NO: 7610 - DNA, 20 bp, synthetic construct
  misc_feature 1..20: note = Description of Artificial Sequence: Synthetic oligonucleotide
  misc_feature 1..20: note = Target: ANGPTL3; (-) strand; PAM type: NRG; PAM sequence: CAG
  source 1..20: mol_type = other DNA
caaatgggttgctttcttac

SEQ ID NO: 7611 - DNA, 20 bp, synthetic construct
  misc_feature 1..20: note = Description of Artificial Sequence: Synthetic oligonucleotide
  misc_feature 1..20: note = Target: ANGPTL3; (-) strand; PAM type: NRG; PAM sequence: GGG
  source 1..20: mol_type = other DNA
tggtaaatacaagtacaaat

SEQ ID NO: 7612 - DNA, 20 bp, synthetic construct
  misc_feature 1..20: note = Description of Artificial Sequence: Synthetic oligonucleotide
  misc_feature 1..20: note = Target: ANGPTL3; (-) strand; PAM type: NRG; PAM sequence: TGG
  source 1..20: mol_type = other DNA
ctggtaaatacaagtacaaa

SEQ ID NO: 7613 - DNA, 20 bp, synthetic construct
  misc_feature 1..20: note = Description of Artificial Sequence: Synthetic oligonucleotide
  misc_feature 1..20: note = Target: ANGPTL3; (-) strand; PAM type: NRG; PAM sequence: AAG
  source 1..20: mol_type = other DNA
taaggattgctggtaaatac

SEQ ID NO: 7614 - DNA, 20 bp, synthetic construct
  misc_feature 1..20: note = Description of Artificial Sequence: Synthetic oligonucleotide
  misc_feature 1..20: note = Target: ANGPTL3; (-) strand; PAM type: NRG; PAM sequence: TGG
  source 1..20: mol_type = other DNA
agcttcattttaaggattgc

SEQ ID NO: 7615 - DNA, 20 bp, synthetic construct
  misc_feature 1..20: note = Description of Artificial Sequence: Synthetic oligonucleotide
  misc_feature 1..20: note = Target: ANGPTL3; (-) strand; PAM type: NRG; PAM sequence: AGG
  source 1..20: mol_type = other DNA
tagtaggaagcttcatttta

SEQ ID NO: 7616 - DNA, 20 bp, synthetic construct
  misc_feature 1..20: note = Description of Artificial Sequence: Synthetic oligonucleotide
  misc_feature 1..20: note = Target: ANGPTL3; (-) strand; PAM type: NRG; PAM sequence: AAG
  source 1..20: mol_type = other DNA
ttagtaggaagcttcatttt

SEQ ID NO: 7617 - DNA, 20 bp, synthetic construct
  misc_feature 1..20: note = Description of Artificial Sequence: Synthetic oligonucleotide
  misc_feature 1..20: note = Target: ANGPTL3; (-) strand; PAM type: NRG; PAM sequence: AAG
  source 1..20: mol_type = other DNA
attgctattgagttagtagg

SEQ ID NO: 7618 - DNA, 20 bp, synthetic construct
  misc_feature 1..20: note = Description of Artificial Sequence: Synthetic oligonucleotide
  misc_feature 1..20: note = Target: ANGPTL3; (-) strand; PAM type: NRG; PAM sequence: AGG
  source 1..20: mol_type = other DNA
cttattgctattgagttagt

SEQ ID NO: 7619 - DNA, 20 bp, synthetic construct
  misc_feature 1..20: note = Description of Artificial Sequence: Synthetic oligonucleotide
  misc_feature 1..20: note = Target: ANGPTL3; (-) strand; PAM type: NRG; PAM sequence: TAG
  source 1..20: mol_type = other DNA
tcttattgctattgagttag

SEQ ID NO: 7620 - DNA, 20 bp, synthetic construct
  misc_feature 1..20: note = Description of Artificial Sequence: Synthetic oligonucleotide
  misc_feature 1..20: note = Target: ANGPTL3; (-) strand; PAM type: NRG; PAM sequence: TAG
  source 1..20: mol_type = other DNA
ttgtcttattgctattgagt

SEQ ID NO: 7621 - DNA, 20 bp, synthetic construct
  misc_feature 1..20: note = Description of Artificial Sequence: Synthetic oligonucleotide
  misc_feature 1..20: note = Target: ANGPTL3; (-) strand; PAM type: NRG; PAM sequence: GAG
  source 1..20: mol_type = other DNA
actattgtcttattgctatt

SEQ ID NO: 7622 - DNA, 20 bp, synthetic construct
  misc_feature 1..20: note = Description of Artificial Sequence: Synthetic oligonucleotide
  misc_feature 1..20: note = Target: ANGPTL3; (-) strand; PAM type: NRG; PAM sequence: AAG
  source 1..20: mol_type = other DNA
catcacaatcctttttatta

SEQ ID NO: 7623 - DNA, 20 bp, synthetic construct
  misc_feature 1..20: note = Description of Artificial Sequence: Synthetic oligonucleotide
  misc_feature 1..20: note = Target: ANGPTL3; (-) strand; PAM type: NRG; PAM sequence: TAG
  source 1..20: mol_type = other DNA
aaacaaataacaaatataaa

SEQ ID NO: 7624 - DNA, 20 bp, synthetic construct
  misc_feature 1..20: note = Description of Artificial Sequence: Synthetic oligonucleotide
  misc_feature 1..20: note = Target: ANGPTL3; (-) strand; PAM type: NRG; PAM sequence: TGG
  source 1..20: mol_type = other DNA
attttaaaaattatttttat

SEQ ID NO: 7625 - DNA, 20 bp, synthetic construct
  misc_feature 1..20: note = Description of Artificial Sequence: Synthetic oligonucleotide
  misc_feature 1..20: note = Target: ANGPTL3; (-) strand; PAM type: NRG; PAM sequence: TGG
  source 1..20: mol_type = other DNA
tcattttaaatttaaaagca

SEQ ID NO: 7626 - DNA, 20 bp, synthetic construct
  misc_feature 1..20: note = Description of Artificial Sequence: Synthetic oligonucleotide
  misc_feature 1..20: note = Target: ANGPTL3; (-) strand; PAM type: NRG; PAM sequence: AAG
  source 1..20: mol_type = other DNA
aaaaatcattttaaatttaa

SEQ ID NO: 7627 - DNA, 20 bp, synthetic construct
  misc_feature 1..20: note = Description of Artificial Sequence: Synthetic oligonucleotide
  misc_feature 1..20: note = Target: ANGPTL3; (-) strand; PAM type: NRG; PAM sequence: AGG
  source 1..20: mol_type = other DNA
ctttctttgtagaaaaagac

SEQ ID NO: 7628 - DNA, 20 bp, synthetic construct
  misc_feature 1..20: note = Description of Artificial Sequence: Synthetic oligonucleotide
  misc_feature 1..20: note = Target: ANGPTL3; (-) strand; PAM type: NRG; PAM sequence: CAG
  source 1..20: mol_type = other DNA
gctttctttgtagaaaaaga

SEQ ID NO: 7629 - DNA, 20 bp, synthetic construct
  misc_feature 1..20: note = Description of Artificial Sequence: Synthetic oligonucleotide
  misc_feature 1..20: note = Target: ANGPTL3; (-) strand; PAM type: NRG; PAM sequence: AAG
  source 1..20: mol_type = other DNA
gtatgctttctttgtagaaa

SEQ ID NO: 7630 - DNA, 20 bp, synthetic construct
  misc_feature 1..20: note = Description of Artificial Sequence: Synthetic oligonucleotide
  misc_feature 1..20: note = Target: ANGPTL3; (-) strand; PAM type: NRG; PAM sequence: TAG
  source 1..20: mol_type = other DNA
cttaatgtatgctttctttg

SEQ ID NO: 7631 - DNA, 20 bp, synthetic construct
  misc_feature 1..20: note = Description of Artificial Sequence: Synthetic oligonucleotide
  misc_feature 1..20: note = Target: ANGPTL3; (-) strand; PAM type: NRG; PAM sequence: TGG
  source 1..20: mol_type = other DNA
tcaaatgtaaacctggcctt

SEQ ID NO: 7632 - DNA, 20 bp, synthetic construct
  misc_feature 1..20: note = Description of Artificial Sequence: Synthetic oligonucleotide
  misc_feature 1..20: note = Target: ANGPTL3; (-) strand; PAM type: NRG; PAM sequence: TGG
  source 1..20: mol_type = other DNA
actttcttcaaatgtaaacc

SEQ ID NO: 7633 - DNA, 20 bp, synthetic construct
  misc_feature 1..20: note = Description of Artificial Sequence: Synthetic oligonucleotide
  misc_feature 1..20: note = Target: ANGPTL3; (-) strand; PAM type: NRG; PAM sequence: GAG
  source 1..20: mol_type = other DNA
ttaagtattcctagagactt

SEQ ID NO: 7634 - DNA, 20 bp, synthetic construct
  misc_feature 1..20: note = Description of Artificial Sequence: Synthetic oligonucleotide
  misc_feature 1..20: note = Target: ANGPTL3; (-) strand; PAM type: NRG; PAM sequence: GAG
  source 1..20: mol_type = other DNA
agatgtgttaagtattccta

SEQ ID NO: 7635 - DNA, 20 bp, synthetic construct
  misc_feature 1..20: note = Description of Artificial Sequence: Synthetic oligonucleotide
  misc_feature 1..20: note = Target: ANGPTL3; (-) strand; PAM type: NRG; PAM sequence: TAG
  source 1..20: mol_type = other DNA
agagatgtgttaagtattcc

SEQ ID NO: 7636 - DNA, 20 bp, synthetic construct
  misc_feature 1..20: note = Description of Artificial Sequence: Synthetic oligonucleotide
  misc_feature 1..20: note = Target: ANGPTL3; (-) strand; PAM type: NRG; PAM sequence: AAG
  source 1..20: mol_type = other DNA
atacagtcaagagatgtgtt

SEQ ID NO: 7637 - DNA, 20 bp, synthetic construct
  misc_feature 1..20: note = Description of Artificial Sequence: Synthetic oligonucleotide
  misc_feature 1..20: note = Target: ANGPTL3; (-) strand; PAM type: NRG; PAM sequence: GAG
  source 1..20: mol_type = other DNA
taacatccatatacagtcaa

SEQ ID NO: 7638 - DNA, 20 bp, synthetic construct
  misc_feature 1..20: note = Description of Artificial Sequence: Synthetic oligonucleotide
  misc_feature 1..20: note = Target: ANGPTL3; (-) strand; PAM type: NRG; PAM sequence: AAG
  source 1..20: mol_type = other DNA
attaacatccatatacagtc

SEQ ID NO: 7639 - DNA, 20 bp, synthetic construct
  misc_feature 1..20: note = Description of Artificial Sequence: Synthetic oligonucleotide
  misc_feature 1..20: note = Target: ANGPTL3; (-) strand; PAM type: NRG; PAM sequence: CAG
  source 1..20: mol_type = other DNA
tatttattaacatccatata

SEQ ID NO: 7640 - DNA, 20 bp, synthetic construct
  misc_feature 1..20: note = Description of Artificial Sequence: Synthetic oligonucleotide
  misc_feature 1..20: note = Target: ANGPTL3; (-) strand; PAM type: NRG; PAM sequence: CAG
  source 1..20: mol_type = other DNA
atatggataaactttactgt

SEQ ID NO: 7641 - DNA, 20 bp, synthetic construct
  misc_feature 1..20: note = Description of Artificial Sequence: Synthetic oligonucleotide
  misc_feature 1..20: note = Target: ANGPTL3; (-) strand; PAM type: NRG; PAM sequence: TGG
  source 1..20: mol_type = other DNA
aatatttgcaagtctttata

SEQ ID NO: 7642 - DNA, 20 bp, synthetic construct
  misc_feature 1..20: note = Description of Artificial Sequence: Synthetic oligonucleotide
  misc_feature 1..20: note = Target: ANGPTL3; (-) strand; PAM type: NRG; PAM sequence: AAG
  source 1..20: mol_type = other DNA
attggtagaggaatatttgc

SEQ ID NO: 7643 - DNA, 20 bp, synthetic construct
  misc_feature 1..20: note = Description of Artificial Sequence: Synthetic oligonucleotide
  misc_feature 1..20: note = Target: ANGPTL3; (-) strand; PAM type: NRG; PAM sequence: AGG
  source 1..20: mol_type = other DNA
taaagtctcgtcattggtag

SEQ ID NO: 7644 - DNA, 20 bp, synthetic construct
  misc_feature 1..20: note = Description of Artificial Sequence: Synthetic oligonucleotide
  misc_feature 1..20: note = Target: ANGPTL3; (-) strand; PAM type: NRG; PAM sequence: GAG
  source 1..20: mol_type = other DNA
ttaaagtctcgtcattggta

SEQ ID NO: 7645 - DNA, 20 bp, synthetic construct
  misc_feature 1..20: note = Description of Artificial Sequence: Synthetic oligonucleotide
  misc_feature 1..20: note = Target: ANGPTL3; (-) strand; PAM type: NRG; PAM sequence: TAG
  source 1..20: mol_type = other DNA
ttttaaagtctcgtcattgg

SEQ ID NO: 7646 - DNA, 20 bp, synthetic construct
  misc_feature 1..20: note = Description of Artificial Sequence: Synthetic oligonucleotide
  misc_feature 1..20: note = Target: ANGPTL3; (-) strand; PAM type: NRG; PAM sequence: TGG
  source 1..20: mol_type = other DNA
atattttaaagtctcgtcat

SEQ ID NO: 7647 - DNA, 20 bp, synthetic construct
  misc_feature 1..20: note = Description of Artificial Sequence: Synthetic oligonucleotide
  misc_feature 1..20: note = Target: ANGPTL3; (-) strand; PAM type: NRG; PAM sequence: AAG
  source 1..20: mol_type = other DNA
acattattatagatatttta

SEQ ID NO: 7648 - DNA, 20 bp, synthetic construct
  misc_feature 1..20: note = Description of Artificial Sequence: Synthetic oligonucleotide
  misc_feature 1..20: note = Target: ANGPTL3; (-) strand; PAM type: NRG; PAM sequence: TAG
  source 1..20: mol_type = other DNA
tgaaatgtgttacattatta

SEQ ID NO: 7649 - DNA, 20 bp, synthetic construct
  misc_feature 1..20: note = Description of Artificial Sequence: Synthetic oligonucleotide
  misc_feature 1..20: note = Target: ANGPTL3; (-) strand; PAM type: NRG; PAM sequence: CAG
  source 1..20: mol_type = other DNA
tatgacaagacatgtttcac

SEQ ID NO: 7650 - DNA, 20 bp, synthetic construct
  misc_feature 1..20: note = Description of Artificial Sequence: Synthetic oligonucleotide
  misc_feature 1..20: note = Target: ANGPTL3; (-) strand; PAM type: NRG; PAM sequence: AAG
  source 1..20: mol_type = other DNA
ctttctataatgcatatgac

SEQ ID NO: 7651 - DNA, 20 bp, synthetic construct
  misc_feature 1..20: note = Description of Artificial Sequence: Synthetic oligonucleotide
  misc_feature 1..20: note = Target: ANGPTL3; (-) strand; PAM type: NRG; PAM sequence: AAG
  source 1..20: mol_type = other DNA
aaaaatattaatataactga

SEQ ID NO: 7652 - DNA, 20 bp, synthetic construct
  misc_feature 1..20: note = Description of Artificial Sequence: Synthetic oligonucleotide
  misc_feature 1..20: note = Target: ANGPTL3; (-) strand; PAM type: NRG; PAM sequence: TAG
  source 1..20: mol_type = other DNA
taaaacaattttattgaaga

SEQ ID NO: 7653 - DNA, 20 bp, synthetic construct
  misc_feature 1..20: note = Description of Artificial Sequence: Synthetic oligonucleotide
  misc_feature 1..20: note = Target: ANGPTL3; (-) strand; PAM type: NRG; PAM sequence: AAG
  source 1..20: mol_type = other DNA
cttttaaaacaattttattg

SEQ ID NO: 7654 - DNA, 20 bp, synthetic construct
  misc_feature 1..20: note = Description of Artificial Sequence: Synthetic oligonucleotide
  misc_feature 1..20: note = Target: ANGPTL3; (-) strand; PAM type: NRG; PAM sequence: TAG
  source 1..20: mol_type = other DNA
cttgaatcccttgatcattt

SEQ ID NO: 7655 - DNA, 20 bp, synthetic construct
  misc_feature 1..20: note = Description of Artificial Sequence: Synthetic oligonucleotide
  misc_feature 1..20: note = Target: ANGPTL3; (-) strand; PAM type: NRG; PAM sequence: TAG
  source 1..20: mol_type = other DNA
gtgcaactaattgagttgtt

SEQ ID NO: 7656 - DNA, 20 bp, synthetic construct
  misc_feature 1..20: note = Description of Artificial Sequence: Synthetic oligonucleotide
  misc_feature 1..20: note = Target: ANGPTL3; (-) strand; PAM type: NRG; PAM sequence: GAG
  source 1..20: mol_type = other DNA
ttttattggtgcaactaatt

SEQ ID NO: 7657 - DNA, 20 bp, synthetic construct
  misc_feature 1..20: note = Description of Artificial Sequence: Synthetic oligonucleotide
  misc_feature 1..20: note = Target: ANGPTL3; (-) strand; PAM type: NRG; PAM sequence: TGG
  source 1..20: mol_type = other DNA
tttttttaagtgttttttat

SEQ ID NO: 7658 - DNA, 20 bp, synthetic construct
  misc_feature 1..20: note = Description of Artificial Sequence: Synthetic oligonucleotide
  misc_feature 1..20: note = Target: ANGPTL3; (-) strand; PAM type: NRG; PAM sequence: AAG
  source 1..20: mol_type = other DNA
tggacactgacagttttttt

SEQ ID NO: 7659 - DNA, 20 bp, synthetic construct
  misc_feature 1..20: note = Description of Artificial Sequence: Synthetic oligonucleotide
  misc_feature 1..20: note = Target: ANGPTL3; (-) strand; PAM type: NRG; PAM sequence: CAG
  source 1..20: mol_type = other DNA
aagtacaggttggacactga

SEQ ID NO: 7660 - DNA, 20 bp, synthetic construct
  misc_feature 1..20: note = Description of Artificial Sequence: Synthetic oligonucleotide
  misc_feature 1..20: note = Target: ANGPTL3; (-) strand; PAM type: NRG; PAM sequence: TGG
  source 1..20: mol_type = other DNA
gtgagttattaagtacaggt

SEQ ID NO: 7661 - DNA, 20 bp, synthetic construct
  misc_feature 1..20: note = Description of Artificial Sequence: Synthetic oligonucleotide
  misc_feature 1..20: note = Target: ANGPTL3; (-) strand; PAM type: NRG; PAM sequence: AGG
  source 1..20: mol_type = other DNA
atctgtgagttattaagtac

SEQ ID NO: 7662 - DNA, 20 bp, synthetic construct
  misc_feature 1..20: note = Description of Artificial Sequence: Synthetic oligonucleotide
  misc_feature 1..20: note = Target: ANGPTL3; (-) strand; PAM type: NRG; PAM sequence: CAG
  source 1..20: mol_type = other DNA
aatctgtgagttattaagta

SEQ ID NO: 7663 - DNA, 20 bp, synthetic construct
  misc_feature 1..20: note = Description of Artificial Sequence: Synthetic oligonucleotide
  misc_feature 1..20: note = Target: ANGPTL3; (-) strand; PAM type: NRG; PAM sequence: AAG
  source 1..20: mol_type = other DNA
ttaaaaatctgtgagttatt

SEQ ID NO: 7664 - DNA, 20 bp, synthetic construct
  misc_feature 1..20: note = Description of Artificial Sequence: Synthetic oligonucleotide
  misc_feature 1..20: note = Target: ANGPTL3; (-) strand; PAM type: NRG; PAM sequence: GAG
  source 1..20: mol_type = other DNA
gaaaagttttaaaaatctgt

SEQ ID NO: 7665 - DNA, 20 bp, synthetic construct
  misc_feature 1..20: note = Description of Artificial Sequence: Synthetic oligonucleotide
  misc_feature 1..20: note = Target: ANGPTL3; (-) strand; PAM type: NRG; PAM sequence: AAG
  source 1..20: mol_type = other DNA
caaaattctcctgaaaagaa

SEQ ID NO: 7666 - DNA, 20 bp, synthetic construct
  misc_feature 1..20: note = Description of Artificial Sequence: Synthetic oligonucleotide
  misc_feature 1..20: note = Target: ANGPTL3; (-) strand; PAM type: NRG; PAM sequence: AAG
  source 1..20: mol_type = other DNA
ccaaccaaaattctcctgaa

SEQ ID NO: 7667 - DNA, 20 bp, synthetic construct
  misc_feature 1..20: note = Description of Artificial Sequence: Synthetic oligonucleotide
  misc_feature 1..20: note = Target: ANGPTL3; (-) strand; PAM type: NRG; PAM sequence: AGG
  source 1..20: mol_type = other DNA
ctatggagtatatcttctct

SEQ ID NO: 7668 - DNA, 20 bp, synthetic construct
  misc_feature 1..20: note = Description of Artificial Sequence: Synthetic oligonucleotide
  misc_feature 1..20: note = Target: ANGPTL3; (-) strand; PAM type: NRG; PAM sequence: TAG
  source 1..20: mol_type = other DNA
actatggagtatatcttctc

SEQ ID NO: 7669 - DNA, 20 bp, synthetic construct
  misc_feature 1..20: note = Description of Artificial Sequence: Synthetic oligonucleotide
  misc_feature 1..20: note = Target: ANGPTL3; (-) strand; PAM type: NRG; PAM sequence: GAG
  source 1..20: mol_type = other DNA
aattagattgcttcactatg

SEQ ID NO: 7670 - DNA, 20 bp, synthetic construct
  misc_feature 1..20: note = Description of Artificial Sequence: Synthetic oligonucleotide
  misc_feature 1..20: note = Target: ANGPTL3; (-) strand; PAM type: NRG; PAM sequence: TGG
  source 1..20: mol_type = other DNA
ataattagattgcttcacta

SEQ ID NO: 7671 - DNA, 20 bp, synthetic construct
  misc_feature 1..20: note = Description of Artificial Sequence: Synthetic oligonucleotide
  misc_feature 1..20: note = Target: ANGPTL3; (-) strand; PAM type: NRG; PAM sequence: TAG
  source 1..20: mol_type = other DNA
ctcaattcgtaaaacataat

SEQ ID NO: 7672 - DNA, 20 bp, synthetic construct
  misc_feature 1..20: note = Description of Artificial Sequence: Synthetic oligonucleotide
  misc_feature 1..20: note = Target: ANGPTL3; (-) strand; PAM type: NRG; PAM sequence: CAG
  source 1..20: mol_type = other DNA
tataatgtttgttgtctttc

SEQ ID NO: 7673 - DNA, 20 bp, synthetic construct
  misc_feature 1..20: note = Description of Artificial Sequence: Synthetic oligonucleotide
  misc_feature 1..20: note = Target: ANGPTL3; (-) strand; PAM type: NRG; PAM sequence: AAG
  source 1..20: mol_type = other DNA
ttcgtgatttcccaagtaaa

SEQ ID NO: 7674 - DNA, 20 bp, synthetic construct
  misc_feature 1..20: note = Description of Artificial Sequence: Synthetic oligonucleotide
  misc_feature 1..20: note = Target: ANGPTL3; (-) strand; PAM type: NRG; PAM sequence: AAG
  source 1..20: mol_type = other DNA
agttggtttcgtgatttccc

SEQ ID NO: 7675 - DNA, 20 bp, synthetic construct
  misc_feature 1..20: note = Description of Artificial Sequence: Synthetic oligonucleotide
  misc_feature 1..20: note = Target: ANGPTL3; (-) strand; PAM type: NRG; PAM sequence: TGG
  source 1..20: mol_type = other DNA
aactagatgtagcgtatagt

SEQ ID NO: 7676 - DNA, 20 bp, synthetic construct
  misc_feature 1..20: note = Description of Artificial Sequence: Synthetic oligonucleotide
  misc_feature 1..20: note = Target: ANGPTL3; (-) strand; PAM type: NRG; PAM sequence: TAG
  source 1..20: mol_type = other DNA
tcgcaactagatgtagcgta

SEQ ID NO: 7677 - DNA, 20 bp, synthetic construct
  misc_feature 1..20: note = Description of Artificial Sequence: Synthetic oligonucleotide
  misc_feature 1..20: note = Target: ANGPTL3; (-) strand; PAM type: NRG; PAM sequence: TAG
  source 1..20: mol_type = other DNA
ccagtaatcgcaactagatg

SEQ ID NO: 7678 - DNA, 20 bp, synthetic construct
  misc_feature 1..20: note = Description of Artificial Sequence: Synthetic oligonucleotide
  misc_feature 1..20: note = Target: ANGPTL3; (-) strand; PAM type: NRG; PAM sequence: TAG
  source 1..20: mol_type = other DNA
acattgccagtaatcgcaac

SEQ ID NO: 7679 - DNA, 20 bp, synthetic construct
  misc_feature 1..20: note = Description of Artificial Sequence: Synthetic oligonucleotide
  misc_feature 1..20: note = Target: ANGPTL3; (-) strand; PAM type: NRG; PAM sequence: CAG
  source 1..20: mol_type = other DNA
gattgcattggggacattgc

SEQ ID NO: 7680 - DNA, 20 bp, synthetic construct
  misc_feature 1..20: note = Description of Artificial Sequence: Synthetic oligonucleotide
  misc_feature 1..20: note = Target: ANGPTL3; (-) strand; PAM type: NRG; PAM sequence: GGG
  source 1..20: mol_type = other DNA
tgttttccgggattgcattg

SEQ ID NO: 7681 - DNA, 20 bp, synthetic construct
  misc_feature 1..20: note = Description of Artificial Sequence: Synthetic oligonucleotide
  misc_feature 1..20: note = Target: ANGPTL3; (-) strand; PAM type: NRG; PAM sequence: GGG
  source 1..20: mol_type = other DNA
ttgttttccgggattgcatt

SEQ ID NO: 7682 - DNA, 20 bp, synthetic construct
  misc_feature 1..20: note = Description of Artificial Sequence: Synthetic oligonucleotide
  misc_feature 1..20: note = Target: ANGPTL3; (-) strand; PAM type: NRG; PAM sequence: TGG
  source 1..20: mol_type = other DNA
tttgttttccgggattgcat

SEQ ID NO: 7683 - DNA, 20 bp, synthetic construct
  misc_feature 1..20: note = Description of Artificial Sequence: Synthetic oligonucleotide
  misc_feature 1..20: note = Target: ANGPTL3; (-) strand; PAM type: NRG; PAM sequence: GGG
  source 1..20: mol_type = other DNA
acaccaaatctttgttttcc

SEQ ID NO: 7684 - DNA, 20 bp, synthetic construct
  misc_feature 1..20: note = Description of Artificial Sequence: Synthetic oligonucleotide
  misc_feature 1..20: note = Target: ANGPTL3; (-) strand; PAM type: NRG; PAM sequence: CGG
  source 1..20: mol_type = other DNA
aacaccaaatctttgttttc

SEQ ID NO: 7685 - DNA, 20 bp, synthetic construct
  misc_feature 1..20: note = Description of Artificial Sequence: Synthetic oligonucleotide
  misc_feature 1..20: note = Target: ANGPTL3; (-) strand; PAM type: NRG; PAM sequence: TAG
  source 1..20: mol_type = other DNA
ttttgctttgtgatcccaag

SEQ ID NO: 7686 - DNA, 20 bp, synthetic construct
  misc_feature 1..20: note = Description of Artificial Sequence: Synthetic oligonucleotide
  misc_feature 1..20: note = Target: ANGPTL3; (-) strand; PAM type: NRG; PAM sequence: AAG
  source 1..20: mol_type = other DNA
tccttttgctttgtgatccc

SEQ ID NO: 7687 - DNA, 20 bp, synthetic construct
  misc_feature 1..20: note = Description of Artificial Sequence: Synthetic oligonucleotide
  misc_feature 1..20: note = Target: ANGPTL3; (-) strand; PAM type: NRG; PAM sequence: AAG
  source 1..20: mol_type = other DNA
aataaccctctggacagttg

SEQ ID NO: 7688 - DNA, 20 bp, synthetic construct
  misc_feature 1..20: note = Description of Artificial Sequence: Synthetic oligonucleotide
  misc_feature 1..20: note = Target: ANGPTL3; (-) strand; PAM type: NRG; PAM sequence: CAG
  source 1..20: mol_type = other DNA
tacctgaataaccctctgga

SEQ ID NO: 7689 - DNA, 20 bp, synthetic construct
  misc_feature 1..20: note = Description of Artificial Sequence: Synthetic oligonucleotide
  misc_feature 1..20: note = Target: ANGPTL3; (-) strand; PAM type: NRG; PAM sequence: TGG
  source 1..20: mol_type = other DNA
aagatacctgaataaccctc

SEQ ID NO: 7690 - DNA, 20 bp, synthetic construct
  misc_feature 1..20: note = Description of Artificial Sequence: Synthetic oligonucleotide
  misc_feature 1..20: note = Target: ANGPTL3; (-) strand; PAM type: NRG; PAM sequence: AAG
  source 1..20: mol_type = other DNA
taaagtattggtatcagaaa

SEQ ID NO: 7691 - DNA, 20 bp, synthetic construct
  misc_feature 1..20: note = Description of Artificial Sequence: Synthetic oligonucleotide
  misc_feature 1..20: note = Target: ANGPTL3; (-) strand; PAM type: NRG; PAM sequence: CAG
  source 1..20: mol_type = other DNA
tgaaaataaagtattggtat

SEQ ID NO: 7692 - DNA, 20 bp, synthetic construct
  misc_feature 1..20: note = Description of Artificial Sequence: Synthetic oligonucleotide
  misc_feature 1..20: note = Target: ANGPTL3; (-) strand; PAM type: NRG; PAM sequence: TGG
  source 1..20: mol_type = other DNA
aagatatgaaaataaagtat

SEQ ID NO: 7693 - DNA, 20 bp, synthetic construct
  misc_feature 1..20: note = Description of Artificial Sequence: Synthetic oligonucleotide
  misc_feature 1..20: note = Target: ANGPTL3; (-) strand; PAM type: NRG; PAM sequence: AAG
  source 1..20: mol_type = other DNA
actttgaagatatgaaaata

SEQ ID NO: 7694 - DNA, 20 bp, synthetic construct
  misc_feature 1..20: note = Description of Artificial Sequence: Synthetic oligonucleotide
  misc_feature 1..20: note = Target: ANGPTL3; (-) strand; PAM type: NRG; PAM sequence: AAG
  source 1..20: mol_type = other DNA
taatgtgggaagatactttg

SEQ ID NO: 7695 - DNA, 20 bp, synthetic construct
  misc_feature 1..20: note = Description of Artificial Sequence: Synthetic oligonucleotide
  misc_feature 1..20: note = Target: ANGPTL3; (-) strand; PAM type: NRG; PAM sequence: AAG
  source 1..20: mol_type = other DNA
ataatagctaataatgtggg

SEQ ID NO: 7696 - DNA, 20 bp, synthetic construct
  misc_feature 1..20: note = Description of Artificial Sequence: Synthetic oligonucleotide
  misc_feature 1..20: note = Target: ANGPTL3; (-) strand; PAM type: NRG; PAM sequence: GGG
  source 1..20: mol_type = other DNA
cagataatagctaataatgt

SEQ ID NO: 7697 - DNA, 20 bp, synthetic construct
  misc_feature 1..20: note = Description of Artificial Sequence: Synthetic oligonucleotide
  misc_feature 1..20: note = Target: ANGPTL3; (-) strand; PAM type: NRG; PAM sequence: TGG
  source 1..20: mol_type = other DNA
gcagataatagctaataatg

SEQ ID NO: 7698 - DNA, 20 bp, synthetic construct
  misc_feature 1..20: note = Description of Artificial Sequence: Synthetic oligonucleotide
  misc_feature 1..20: note = Target: ANGPTL3; (-) strand; PAM type: NRG; PAM sequence: TAG
  source 1..20: mol_type = other DNA
aaagttgtcattgcagataa

SEQ ID NO: 7699 - DNA, 20 bp, synthetic construct
  misc_feature 1..20: note = Description of Artificial Sequence: Synthetic oligonucleotide
  misc_feature 1..20: note = Target: ANGPTL3; (-) strand; PAM type: NRG; PAM sequence: CAG
  source 1..20: mol_type = other DNA
atttttaaaagttgtcattg

SEQ ID NO: 7700 - DNA, 20 bp, synthetic construct
  misc_feature 1..20: note = Description of Artificial Sequence: Synthetic oligonucleotide
  misc_feature 1..20: note = Target: ANGPTL3; (-) strand; PAM type: NRG; PAM sequence: AAG
  source 1..20: mol_type = other DNA
tttgggattcggatttttaa

SEQ ID NO: 7701 - DNA, 20 bp, synthetic construct
  misc_feature 1..20: note = Description of Artificial Sequence: Synthetic oligonucleotide
  misc_feature 1..20: note = Target: ANGPTL3; (-) strand; PAM type: NRG; PAM sequence: CGG
  source 1..20: mol_type = other DNA
gaaaacgcttatttgggatt

SEQ ID NO: 7702 - DNA, 20 bp, synthetic construct
  misc_feature 1..20: note = Description of Artificial Sequence: Synthetic oligonucleotide
  misc_feature 1..20: note = Target: ANGPTL3; (-) strand; PAM type: NRG; PAM sequence: GGG
  source 1..20: mol_type = other DNA
tagagagaaaacgcttattt

SEQ ID NO: 7703 - DNA, 20 bp, synthetic construct
  misc_feature 1..20: note = Description of Artificial Sequence: Synthetic oligonucleotide
  misc_feature 1..20: note = Target: ANGPTL3; (-) strand; PAM type: NRG; PAM sequence: TGG
  source 1..20: mol_type = other DNA
ctagagagaaaacgcttatt

SEQ ID NO: 7704 - DNA, 20 bp, synthetic construct
  misc_feature 1..20: note = Description of Artificial Sequence: Synthetic oligonucleotide
  misc_feature 1..20: note = Target: ANGPTL3; (-) strand; PAM type: NRG; PAM sequence: GAG
  source 1..20: mol_type = other DNA
ttaagaggttttcgtctaga

SEQ ID NO: 7705 - DNA, 20 bp, synthetic construct
  misc_feature 1..20: note = Description of Artificial Sequence: Synthetic oligonucleotide
  misc_feature 1..20: note = Target: ANGPTL3; (-) strand; PAM type: NRG; PAM sequence: GAG
  source 1..20: mol_type = other DNA
agttaagaggttttcgtcta

SEQ ID NO: 7706 - DNA, 20 bp, synthetic construct
  misc_feature 1..20: note = Description of Artificial Sequence: Synthetic oligonucleotide
  misc_feature 1..20: note = Target: ANGPTL3; (-) strand; PAM type: NRG; PAM sequence: TAG
  source 1..20: mol_type = other DNA
atagttaagaggttttcgtc

SEQ ID NO: 7707 - DNA, 20 bp, synthetic construct
  misc_feature 1..20: note = Description of Artificial Sequence: Synthetic oligonucleotide
  misc_feature 1..20: note = Target: ANGPTL3; (-) strand; PAM type: NRG; PAM sequence: AGG
  source 1..20: mol_type = other DNA
acactttcattatagttaag

SEQ ID NO: 7708 - DNA, 20 bp, synthetic construct
  misc_feature 1..20: note = Description of Artificial Sequence: Synthetic oligonucleotide
  misc_feature 1..20: note = Target: ANGPTL3; (-) strand; PAM type: NRG; PAM sequence: GAG
  source 1..20: mol_type = other DNA
aacactttcattatagttaa

SEQ ID NO: 7709 - DNA, 20 bp, synthetic construct
  misc_feature 1..20: note = Description of Artificial Sequence: Synthetic oligonucleotide
  misc_feature 1..20: note = Target: ANGPTL3; (-) strand; PAM type: NRG; PAM sequence: AAG
  source 1..20: mol_type = other DNA
tgaacactttcattatagtt

SEQ ID NO: 7710 - DNA, 20 bp, synthetic construct
  misc_feature 1..20: note = Description of Artificial Sequence: Synthetic oligonucleotide
  misc_feature 1..20: note = Target: ANGPTL3; (-) strand; PAM type: NRG; PAM sequence: TAG
  source 1..20: mol_type = other DNA
tagaatgaacactttcatta

SEQ ID NO: 7711 - DNA, 20 bp, synthetic construct
  misc_feature 1..20: note = Description of Artificial Sequence: Synthetic oligonucleotide
  misc_feature 1..20: note = Target: ANGPTL3; (-) strand; PAM type: NRG; PAM sequence: TAG
  source 1..20: mol_type = other DNA
ggtaaaatacctgattgaac

SEQ ID NO: 7712 - DNA, 20 bp, synthetic construct
  misc_feature 1..20: note = Description of Artificial Sequence: Synthetic oligonucleotide
  misc_feature 1..20: note = Target: ANGPTL3; (-) strand; PAM type: NRG; PAM sequence: AGG
  source 1..20: mol_type = other DNA
gaaaatctgaggaagattag

SEQ ID NO: 7713 - DNA, 20 bp, synthetic construct
  misc_feature 1..20: note = Description of Artificial Sequence: Synthetic oligonucleotide
  misc_feature 1..20: note = Target: ANGPTL3; (-) strand; PAM type: NRG; PAM sequence: GAG
  source 1..20: mol_type = other DNA
agaaaatctgaggaagatta

SEQ ID NO: 7714 - DNA, 20 bp, synthetic construct
  misc_feature 1..20: note = Description of Artificial Sequence: Synthetic oligonucleotide
  misc_feature 1..20: note = Target: ANGPTL3; (-) strand; PAM type: NRG; PAM sequence: TAG
  source 1..20: mol_type = other DNA
atagaaaatctgaggaagat

SEQ ID NO: 7715 - DNA, 20 bp, synthetic construct
  misc_feature 1..20: note = Description of Artificial Sequence: Synthetic oligonucleotide
  misc_feature 1..20: note = Target: ANGPTL3; (-) strand; PAM type: NRG; PAM sequence: AAG
  source 1..20: mol_type = other DNA
aaaaaatagaaaatctgagg

SEQ ID NO: 7716 - DNA, 20 bp, synthetic construct
  misc_feature 1..20: note = Description of Artificial Sequence: Synthetic oligonucleotide
  misc_feature 1..20: note = Target: ANGPTL3; (-) strand; PAM type: NRG; PAM sequence: AGG
  source 1..20: mol_type = other DNA
accaaaaaatagaaaatctg

SEQ ID NO: 7717 - DNA, 20 bp, synthetic construct
  misc_feature 1..20: note = Description of Artificial Sequence: Synthetic oligonucleotide
  misc_feature 1..20: note = Target: ANGPTL3; (-) strand; PAM type: NRG; PAM sequence: GAG
  source 1..20: mol_type = other DNA
taccaaaaaatagaaaatct

SEQ ID NO: 7718 - DNA, 20 bp, synthetic construct
  misc_feature 1..20: note = Description of Artificial Sequence: Synthetic oligonucleotide
  misc_feature 1..20: note = Target: ANGPTL3; (-) strand; PAM type: NRG; PAM sequence: TAG
  source 1..20: mol_type = other DNA
atctatacactaccaaaaaa

SEQ ID NO: 7719 - DNA, 20 bp, synthetic construct
  misc_feature 1..20: note = Description of Artificial Sequence: Synthetic oligonucleotide
  misc_feature 1..20: note = Target: ANGPTL3; (-) strand; PAM type: NRG; PAM sequence: AAG
  source 1..20: mol_type = other DNA
cagttttaaataatctgtat

SEQ ID NO: 7720 - DNA, 20 bp, synthetic construct
  misc_feature 1..20: note = Description of Artificial Sequence: Synthetic oligonucleotide
  misc_feature 1..20: note = Target: ANGPTL3; (-) strand; PAM type: NRG; PAM sequence: CAG
  source 1..20: mol_type = other DNA
tgttttagatgcatgtatcc

SEQ ID NO: 7721 - DNA, 20 bp, synthetic construct
  misc_feature 1..20: note = Description of Artificial Sequence: Synthetic oligonucleotide
  misc_feature 1..20: note = Target: ANGPTL3; (-) strand; PAM type: NRG; PAM sequence: TAG
  source 1..20: mol_type = other DNA
ttataaatattacagtgttt

SEQ ID NO: 7722 - DNA, 20 bp, synthetic construct
  misc_feature 1..20: note = Description of Artificial Sequence: Synthetic oligonucleotide
  misc_feature 1..20: note = Target: ANGPTL3; (-) strand; PAM type: NRG; PAM sequence: CAG
  source 1..20: mol_type = other DNA
ttcctttcttataaatatta

SEQ ID NO: 7723 - DNA, 20 bp, synthetic construct
  misc_feature 1..20: note = Description of Artificial Sequence: Synthetic oligonucleotide
  misc_feature 1..20: note = Target: ANGPTL3; (-) strand; PAM type: NRG; PAM sequence: AAG
  source 1..20: mol_type = other DNA
ctgttactgtatttccccgt

SEQ ID NO: 7724 - DNA, 20 bp, synthetic construct
  misc_feature 1..20: note = Description of Artificial Sequence: Synthetic oligonucleotide
  misc_feature 1..20: note = Target: ANGPTL3; (-) strand; PAM type: NRG; PAM sequence: TAG
  source 1..20: mol_type = other DNA
aatgggtacagactcgtatg

SEQ ID NO: 7725 - DNA, 20 bp, synthetic construct
  misc_feature 1..20: note = Description of Artificial Sequence: Synthetic oligonucleotide
  misc_feature 1..20: note = Target: ANGPTL3; (-) strand; PAM type: NRG; PAM sequence: CAG
  source 1..20: mol_type = other DNA
gatatgcaatttaatgggta

SEQ ID NO: 7726 - DNA, 20 bp, synthetic construct
  misc_feature 1..20: note = Description of Artificial Sequence: Synthetic oligonucleotide
  misc_feature 1..20: note = Target: ANGPTL3; (-) strand; PAM type: NRG; PAM sequence: GGG
  source 1..20: mol_type = other DNA
agatagatatgcaatttaat

SEQ ID NO: 7727 - DNA, 20 bp, synthetic construct
  misc_feature 1..20: note = Description of Artificial Sequence: Synthetic oligonucleotide
  misc_feature 1..20: note = Target: ANGPTL3; (-) strand; PAM type: NRG; PAM sequence: TGG
  source 1..20: mol_type = other DNA
gagatagatatgcaatttaa

SEQ ID NO: 7728 - DNA, 20 bp, synthetic construct
  misc_feature 1..20: note = Description of Artificial Sequence: Synthetic oligonucleotide
  misc_feature 1..20: note = Target: ANGPTL3; (-) strand; PAM type: NRG; PAM sequence: TAG
  source 1..20: mol_type = other DNA
caccagcctcctaaaggaga

SEQ ID NO: 7729 - DNA, 20 bp, synthetic construct
  misc_feature 1..20: note = Description of Artificial Sequence: Synthetic oligonucleotide
  misc_feature 1..20: note = Target: ANGPTL3; (-) strand; PAM type: NRG; PAM sequence: GAG
  source 1..20: mol_type = other DNA
ccaccaccagcctcctaaag

SEQ ID NO: 7730 - DNA, 20 bp, synthetic construct
  misc_feature 1..20: note = Description of Artificial Sequence: Synthetic oligonucleotide
  misc_feature 1..20: note = Target: ANGPTL3; (-) strand; PAM type: NRG; PAM sequence: AGG
  source 1..20: mol_type = other DNA
tgccaccaccagcctcctaa

SEQ ID NO: 7731 - DNA, 20 bp, synthetic construct
  misc_feature 1..20: note = Description of Artificial Sequence: Synthetic oligonucleotide
  misc_feature 1..20: note = Target: ANGPTL3; (-) strand; PAM type: NRG; PAM sequence: AAG
  source 1..20: mol_type = other DNA
atgccaccaccagcctccta

SEQ ID NO: 7732 - DNA, 20 bp, synthetic construct
  misc_feature 1..20: note = Description of Artificial Sequence: Synthetic oligonucleotide
  misc_feature 1..20: note = Target: ANGPTL3; (-) strand; PAM type: NRG; PAM sequence: CAG
  source 1..20: mol_type = other DNA
cacactcatcatgccaccac

SEQ ID NO: 7733 - DNA, 20 bp, synthetic construct
  misc_feature 1..20: note = Description of Artificial Sequence: Synthetic oligonucleotide
  misc_feature 1..20: note = Target: ANGPTL3; (-) strand; PAM type: NRG; PAM sequence: AGG
  source 1..20: mol_type = other DNA
gtttgttatatttaccattt

SEQ ID NO: 7734 - DNA, 20 bp, synthetic construct
  misc_feature 1..20: note = Description of Artificial Sequence: Synthetic oligonucleotide
  misc_feature 1..20: note = Target: ANGPTL3; (-) strand; PAM type: NRG; PAM sequence: TAG
  source 1..20: mol_type = other DNA
ggtttgttatatttaccatt

SEQ ID NO: 7735 - DNA, 20 bp, synthetic construct
  misc_feature 1..20: note = Description of Artificial Sequence: Synthetic oligonucleotide
  misc_feature 1..20: note = Target: ANGPTL3; (-) strand; PAM type: NRG; PAM sequence: TGG
  source 1..20: mol_type = other DNA
tctggcttagattttgctct

SEQ ID NO: 7736 - DNA, 20 bp, synthetic construct
  misc_feature 1..20: note = Description of Artificial Sequence: Synthetic oligonucleotide
  misc_feature 1..20: note = Target: ANGPTL3; (-) strand; PAM type: NRG; PAM sequence: TAG
  source 1..20: mol_type = other DNA
tcctcttctcctctctggct

SEQ ID NO: 7737 - DNA, 20 bp, synthetic construct
  misc_feature 1..20: note = Description of Artificial Sequence: Synthetic oligonucleotide
  misc_feature 1..20: note = Target: ANGPTL3; (-) strand; PAM type: NRG; PAM sequence: TGG
  source 1..20: mol_type = other DNA
gataatcctcttctcctctc

SEQ ID NO: 7738 - DNA, 20 bp, synthetic construct
  misc_feature 1..20: note = Description of Artificial Sequence: Synthetic oligonucleotide
  misc_feature 1..20: note = Target: ANGPTL3; (-) strand; PAM type: NRG; PAM sequence: AAG
  source 1..20: mol_type = other DNA
ccttccattttgagacttcc

SEQ ID NO: 7739 - DNA, 20 bp, synthetic construct
  misc_feature 1..20: note = Description of Artificial Sequence: Synthetic oligonucleotide
  misc_feature 1..20: note = Target: ANGPTL3; (-) strand; PAM type: NRG; PAM sequence: GAG
  source 1..20: mol_type = other DNA
agagtataaccttccatttt

SEQ ID NO: 7740 - DNA, 20 bp, synthetic construct
  misc_feature 1..20: note = Description of Artificial Sequence: Synthetic oligonucleotide
  misc_feature 1..20: note = Target: ANGPTL3; (-) strand; PAM type: NRG; PAM sequence: GAG
  source 1..20: mol_type = other DNA
acattttggttgattttata

SEQ ID NO: 7741 - DNA, 20 bp, synthetic construct
  misc_feature 1..20: note = Description of Artificial Sequence: Synthetic oligonucleotide
  misc_feature 1..20: note = Target: ANGPTL3; (-) strand; PAM type: NRG; PAM sequence: TAG
  source 1..20: mol_type = other DNA
caacattttggttgatttta

SEQ ID NO: 7742 - DNA, 20 bp, synthetic construct
  misc_feature 1..20: note = Description of Artificial Sequence: Synthetic oligonucleotide
  misc_feature 1..20: note = Target: ANGPTL3; (-) strand; PAM type: NRG; PAM sequence: TGG
  source 1..20: mol_type = other DNA
tgttggatggatcaacattt

SEQ ID NO: 7743 - DNA, 20 bp, synthetic construct
  misc_feature 1..20: note = Description of Artificial Sequence: Synthetic oligonucleotide
  misc_feature 1..20: note = Target: ANGPTL3; (-) strand; PAM type: NRG; PAM sequence: TGG
  source 1..20: mol_type = other DNA
agctttctgaatctgttgga

SEQ ID NO: 7744 - DNA, 20 bp, synthetic construct
  misc_feature 1..20: note = Description of Artificial Sequence: Synthetic oligonucleotide
  misc_feature 1..20: note = Target: ANGPTL3; (-) strand; PAM type: NRG; PAM sequence: TGG
  source 1..20: mol_type = other DNA
tcaaagctttctgaatctgt

SEQ ID NO: 7745 - DNA, 20 bp, synthetic construct
  misc_feature 1..20: note = Description of Artificial Sequence: Synthetic oligonucleotide
  misc_feature 1..20: note = Target: ANGPTL3; (-) strand; PAM type: NRG; PAM sequence: AAG
  source 1..20: mol_type = other DNA
aatttgcctcagttcattca

SEQ ID NO: 7746 - DNA, 20 bp, synthetic construct
  misc_feature 1..20: note = Description of Artificial Sequence: Synthetic oligonucleotide
  misc_feature 1..20: note = Target: ANGPTL3; (-) strand; PAM type: NRG; PAM sequence: CAG
  source 1..20: mol_type = other DNA
attgccttttaaatttgcct

SEQ ID NO: 7747 - DNA, 20 bp, synthetic construct
  misc_feature 1..20: note = Description of Artificial Sequence: Synthetic oligonucleotide
  misc_feature 1..20: note = Target: ANGPTL3; (-) strand; PAM type: NRG; PAM sequence: AGG
  source 1..20: mol_type = other DNA
gaccacattaacttggaatg

SEQ ID NO: 7748 - DNA, 20 bp, synthetic construct
  misc_feature 1..20: note = Description of Artificial Sequence: Synthetic oligonucleotide
  misc_feature 1..20: note = Target: ANGPTL3; (-) strand; PAM type: NRG; PAM sequence: GAG
  source 1..20: mol_type = other DNA
agaccacattaacttggaat

SEQ ID NO: 7749 - DNA, 20 bp, synthetic construct
  misc_feature 1..20: note = Description of Artificial Sequence: Synthetic oligonucleotide
  misc_feature 1..20: note = Target: ANGPTL3; (-) strand; PAM type: NRG; PAM sequence: TGG
  source 1..20: mol_type = other DNA
attattagaccacattaact

SEQ ID NO: 7750 - DNA, 20 bp, synthetic construct
  misc_feature 1..20: note = Description of Artificial Sequence: Synthetic oligonucleotide
  misc_feature 1..20: note = Target: ANGPTL3; (-) strand; PAM type: NRG; PAM sequence: TAG
  source 1..20: mol_type = other DNA
aggatttaataccagattat

SEQ ID NO: 7751 - DNA, 20 bp, synthetic construct
  misc_feature 1..20: note = Description of Artificial Sequence: Synthetic oligonucleotide
  misc_feature 1..20: note = Target: ANGPTL3; (-) strand; PAM type: NRG; PAM sequence: CAG
  source 1..20: mol_type = other DNA
ttctcttaaggatttaatac

SEQ ID NO: 7752 - DNA, 20 bp, synthetic construct
  misc_feature 1..20: note = Description of Artificial Sequence: Synthetic oligonucleotide
  misc_feature 1..20: note = Target: ANGPTL3; (-) strand; PAM type: NRG; PAM sequence: AGG
  source 1..20: mol_type = other DNA
atttctcaagctttctctta

SEQ ID NO: 7753 - DNA, 20 bp, synthetic construct
  misc_feature 1..20: note = Description of Artificial Sequence: Synthetic oligonucleotide
  misc_feature 1..20: note = Target: ANGPTL3; (-) strand; PAM type: NRG; PAM sequence: AAG
  source 1..20: mol_type = other DNA
tatttctcaagctttctctt

SEQ ID NO: 7754 - DNA, 20 bp, synthetic construct
  misc_feature 1..20: note = Description of Artificial Sequence: Synthetic oligonucleotide
  misc_feature 1..20: note = Target: ANGPTL3; (-) strand; PAM type: NRG; PAM sequence: AAG
  source 1..20: mol_type = other DNA
ataaaaaaaatctatttctc

SEQ ID NO: 7755 - DNA, 20 bp, synthetic construct
  misc_feature 1..20: note = Description of Artificial Sequence: Synthetic oligonucleotide
  misc_feature 1..20: note = Target: ANGPTL3; (-) strand; PAM type: NRG; PAM sequence: AAG
  source 1..20: mol_type = other DNA
cttaaatagacagtgacttt

SEQ ID NO: 7756 - DNA, 20 bp, synthetic construct
  misc_feature 1..20: note = Description of Artificial Sequence: Synthetic oligonucleotide
  misc_feature 1..20: note = Target: ANGPTL3; (-) strand; PAM type: NRG; PAM sequence: CAG
  source 1..20: mol_type = other DNA
tatgtttaatcttaaataga

SEQ ID NO: 7757 - DNA, 20 bp, synthetic construct
  misc_feature 1..20: note = Description of Artificial Sequence: Synthetic oligonucleotide
  misc_feature 1..20: note = Target: ANGPTL3; (-) strand; PAM type: NRG; PAM sequence: TAG
  source 1..20: mol_type = other DNA
attgtatgtttaatcttaaa

SEQ ID NO: 7758 - DNA, 20 bp, synthetic construct
  misc_feature 1..20: note = Description of Artificial Sequence: Synthetic oligonucleotide
  misc_feature 1..20: note = Target: ANGPTL3; (-) strand; PAM type: NRG; PAM sequence: AGG
  source 1..20: mol_type = other DNA
aatgtaaacggtattcttta

SEQ ID NO: 7759 - DNA, 20 bp, synthetic construct
  misc_feature 1..20: note = Description of Artificial Sequence: Synthetic oligonucleotide
  misc_feature 1..20: note = Target: ANGPTL3; (-) strand; PAM type: NRG; PAM sequence: AAG
  source 1..20: mol_type = other DNA
aaatgtaaacggtattcttt

SEQ ID NO: 7760 - DNA, 20 bp, synthetic construct
  misc_feature 1..20: note = Description of Artificial Sequence: Synthetic oligonucleotide
  misc_feature 1..20: note = Target: ANGPTL3; (-) strand; PAM type: NRG; PAM sequence: CGG
  source 1..20: mol_type = other DNA
ttttgattgagaaatgtaaa

SEQ ID NO: 7761 - DNA, 20 bp, synthetic construct
  misc_feature 1..20: note = Description of Artificial Sequence: Synthetic oligonucleotide
  misc_feature 1..20: note = Target: ANGPTL3; (-) strand; PAM type: NRG; PAM sequence: GAG
  source 1..20: mol_type = other DNA
gtattataagaattttgatt

SEQ ID NO: 7762 - DNA, 20 bp, synthetic construct
  misc_feature 1..20: note = Description of Artificial Sequence: Synthetic oligonucleotide
  misc_feature 1..20: note = Target: ANGPTL3; (-) strand; PAM type: NRG; PAM sequence: AAG
  source 1..20: mol_type = other DNA
tttaaaacaaatagtattat

SEQ ID NO: 7763 - DNA, 20 bp, synthetic construct
  misc_feature 1..20: note = Description of Artificial Sequence: Synthetic oligonucleotide
  misc_feature 1..20: note = Target: ANGPTL3; (-) strand; PAM type: NRG; PAM sequence: TAG
  source 1..20: mol_type = other DNA
atcacaaaatttaaaacaaa

SEQ ID NO: 7764 - DNA, 20 bp, synthetic construct
  misc_feature 1..20: note = Description of Artificial Sequence: Synthetic oligonucleotide
  misc_feature 1..20: note = Target: ANGPTL3; (-) strand; PAM type: NRG; PAM sequence: TAG
  source 1..20: mol_type = other DNA
ttcacctattgattataatc

SEQ ID NO: 7765 - DNA, 20 bp, synthetic construct
  misc_feature 1..20: note = Description of Artificial Sequence: Synthetic oligonucleotide
  misc_feature 1..20: note = Target: ANGPTL3; (-) strand; PAM type: NRG; PAM sequence: AAG
  source 1..20: mol_type = other DNA
atttagaaaagttatttaat

SEQ ID NO: 7766 - DNA, 20 bp, synthetic construct
  misc_feature 1..20: note = Description of Artificial Sequence: Synthetic oligonucleotide
  misc_feature 1..20: note = Target: ANGPTL3; (-) strand; PAM type: NRG; PAM sequence: AAG
  source 1..20: mol_type = other DNA
tctaaattttttatttagaa

SEQ ID NO: 7767 - DNA, 20 bp, synthetic construct
  misc_feature 1..20: note = Description of Artificial Sequence: Synthetic oligonucleotide
  misc_feature 1..20: note = Target: ANGPTL3; (-) strand; PAM type: NRG; PAM sequence: TAG
  source 1..20: mol_type = other DNA
aagtctctaaattttttatt

SEQ ID NO: 7768 - DNA, 20 bp, synthetic construct
  misc_feature 1..20: note = Description of Artificial Sequence: Synthetic oligonucleotide
  misc_feature 1..20: note = Target: ANGPTL3; (-) strand; PAM type: NRG; PAM sequence: AAG
  source 1..20: mol_type = other DNA
tatgatgccttttaaaataa

SEQ ID NO: 7769 - DNA, 20 bp, synthetic construct
  misc_feature 1..20: note = Description of Artificial Sequence: Synthetic oligonucleotide
  misc_feature 1..20: note = Target: ANGPTL3; (-) strand; PAM type: NRG; PAM sequence: TAG
  source 1..20: mol_type = other DNA
aactgggaaagttgtgatat

SEQ ID NO: 7770 - DNA, 20 bp, synthetic construct
  misc_feature 1..20: note = Description of Artificial Sequence: Synthetic oligonucleotide
  misc_feature 1..20: note = Target: ANGPTL3; (-) strand; PAM type: NRG; PAM sequence: AAG
  source 1..20: mol_type = other DNA
actagttttttaaactggga

SEQ ID NO: 7771 - DNA, 20 bp, synthetic construct
  misc_feature 1..20: note = Description of Artificial Sequence: Synthetic oligonucleotide
  misc_feature 1..20: note = Target: ANGPTL3; (-) strand; PAM type: NRG; PAM sequence: GGG
  source 1..20: mol_type = other DNA
gagtactagttttttaaact

SEQ ID NO: 7772 - DNA, 20 bp, synthetic construct
  misc_feature 1..20: note = Description of Artificial Sequence: Synthetic oligonucleotide
  misc_feature 1..20: note = Target: ANGPTL3; (-) strand; PAM type: NRG; PAM sequence: TGG
  source 1..20: mol_type = other DNA
agagtactagttttttaaac

SEQ ID NO: 7773 - DNA, 20 bp, synthetic construct
  misc_feature 1..20: note = Description of Artificial Sequence: Synthetic oligonucleotide
  misc_feature 1..20: note = Target: ANGPTL3; (-) strand; PAM type: NRG; PAM sequence: TAG
  source 1..20: mol_type = other DNA
tagagttttaacaagagtac

SEQ ID NO: 7774 - DNA, 20 bp, synthetic construct
  misc_feature 1..20: note = Description of Artificial Sequence: Synthetic oligonucleotide
  misc_feature 1..20: note = Target: ANGPTL3; (-) strand; PAM type: NRG; PAM sequence: GAG
  source 1..20: mol_type = other DNA
caagtttagagttttaacaa

SEQ ID NO: 7775 - DNA, 20 bp, synthetic construct
  misc_feature 1..20: note = Description of Artificial Sequence: Synthetic oligonucleotide
  misc_feature 1..20: note = Target: ANGPTL3; (-) strand; PAM type: NRG; PAM sequence: AAG
  source 1..20: mol_type = other DNA
gtcaagtttagagttttaac

SEQ ID NO: 7776 - DNA, 20 bp, synthetic construct
  misc_feature 1..20: note = Description of Artificial Sequence: Synthetic oligonucleotide
  misc_feature 1..20: note = Target: ANGPTL3; (-) strand; PAM type: NRG; PAM sequence: GAG
  source 1..20: mol_type = other DNA
tctgtatttagtcaagttta

SEQ ID NO: 7777 - DNA, 20 bp, synthetic construct
  misc_feature 1..20: note = Description of Artificial Sequence: Synthetic oligonucleotide
  misc_feature 1..20: note = Target: ANGPTL3; (-) strand; PAM type: NRG; PAM sequence: TAG
  source 1..20: mol_type = other DNA
cctctgtatttagtcaagtt

SEQ ID NO: 7778 - DNA, 20 bp, synthetic construct
  misc_feature 1..20: note = Description of Artificial Sequence: Synthetic oligonucleotide
  misc_feature 1..20: note = Target: ANGPTL3; (-) strand; PAM type: NRG; PAM sequence: AAG
  source 1..20: mol_type = other DNA
ccagtcctctgtatttagtc

SEQ ID NO: 7779 - DNA, 20 bp, synthetic construct
  misc_feature 1..20: note = Description of Artificial Sequence: Synthetic oligonucleotide
  misc_feature 1..20: note = Target: ANGPTL3; (-) strand; PAM type: NRG; PAM sequence: TAG
  source 1..20: mol_type = other DNA
aattaccagtcctctgtatt

SEQ ID NO: 7780 - DNA, 20 bp, synthetic construct
  misc_feature 1..20: note = Description of Artificial Sequence: Synthetic oligonucleotide
  misc_feature 1..20: note = Target: ANGPTL3; (-) strand; PAM type: NRG; PAM sequence: CAG
  source 1..20: mol_type = other DNA
tttaagaactgtacaattac

SEQ ID NO: 7781 - DNA, 20 bp, synthetic construct
  misc_feature 1..20: note = Description of Artificial Sequence: Synthetic oligonucleotide
  misc_feature 1..20: note = Target: ANGPTL3; (-) strand; PAM type: NRG; PAM sequence: AAG
  source 1..20: mol_type = other DNA
aaattaatactacaacattt

SEQ ID NO: 7782 - DNA, 20 bp, synthetic construct
  misc_feature 1..20: note = Description of Artificial Sequence: Synthetic oligonucleotide
  misc_feature 1..20: note = Target: ANGPTL3; (-) strand; PAM type: NRG; PAM sequence: TAG
  source 1..20: mol_type = other DNA
tactctgtgctgacgatttt

SEQ ID NO: 7783 - DNA, 20 bp, synthetic construct
  misc_feature 1..20: note = Description of Artificial Sequence: Synthetic oligonucleotide
  misc_feature 1..20: note = Target: ANGPTL3; (-) strand; PAM type: NRG; PAM sequence: CAG
  source 1..20: mol_type = other DNA
cagtttaaaaatttgtatta

SEQ ID NO: 7784 - DNA, 20 bp, synthetic construct
  misc_feature 1..20: note = Description of Artificial Sequence: Synthetic oligonucleotide
  misc_feature 1..20: note = Target: ANGPTL3; (-) strand; PAM type: NRG; PAM sequence: CAG
  source 1..20: mol_type = other DNA
tttgtagcaaaatgaagcat

SEQ ID NO: 7785 - DNA, 20 bp, synthetic construct
  misc_feature 1..20: note = Description of Artificial Sequence: Synthetic oligonucleotide
  misc_feature 1..20: note = Target: ANGPTL3; (-) strand; PAM type: NRG; PAM sequence: AAG
  source 1..20: mol_type = other DNA
aattattttgtagcaaaatg

SEQ ID NO: 7786 - DNA, 20 bp, synthetic construct
  misc_feature 1..20: note = Description of Artificial Sequence: Synthetic oligonucleotide
  misc_feature 1..20: note = Target: ANGPTL3; (-) strand; PAM type: NRG; PAM sequence: TAG
  source 1..20: mol_type = other DNA
atttactccaaattattttg

SEQ ID NO: 7787 - DNA, 20 bp, synthetic construct
  misc_feature 1..20: note = Description of Artificial Sequence: Synthetic oligonucleotide
  misc_feature 1..20: note = Target: ANGPTL3; (-) strand; PAM type: NRG; PAM sequence: AGG
  source 1..20: mol_type = other DNA
gtatttaattctgcttcatt

SEQ ID NO: 7788 - DNA, 20 bp, synthetic construct
  misc_feature 1..20: note = Description of Artificial Sequence: Synthetic oligonucleotide
  misc_feature 1..20: note = Target: ANGPTL3; (-) strand; PAM type: NRG; PAM sequence: TAG
  source 1..20: mol_type = other DNA
agtatttaattctgcttcat

SEQ ID NO: 7789 - DNA, 20 bp, synthetic construct
  misc_feature 1..20: note = Description of Artificial Sequence: Synthetic oligonucleotide
  misc_feature 1..20: note = Target: ANGPTL3; (-) strand; PAM type: NRG; PAM sequence: CAG
  source 1..20: mol_type = other DNA
acagcgaacttattttaata

SEQ ID NO: 7790 - DNA, 20 bp, synthetic construct
  misc_feature 1..20: note = Description of Artificial Sequence: Synthetic oligonucleotide
  misc_feature 1..20: note = Target: ANGPTL3; (-) strand; PAM type: NRG; PAM sequence: CAG
  source 1..20: mol_type = other DNA
catctccatttgtttaaaga

SEQ ID NO: 7791 - DNA, 20 bp, synthetic construct
  misc_feature 1..20: note = Description of Artificial Sequence: Synthetic oligonucleotide
  misc_feature 1..20: note = Target: ANGPTL3; (-) strand; PAM type: NRG; PAM sequence: AAG
  source 1..20: mol_type = other DNA
tagtcatctccatttgttta

SEQ ID NO: 7792 - DNA, 20 bp, synthetic construct
  misc_feature 1..20: note = Description of Artificial Sequence: Synthetic oligonucleotide
  misc_feature 1..20: note = Target: ANGPTL3; (-) strand; PAM type: NRG; PAM sequence: TAG
  source 1..20: mol_type = other DNA
ttaaagtcaatgtgacttag

SEQ ID NO: 7793 - DNA, 20 bp, synthetic construct
  misc_feature 1..20: note = Description of Artificial Sequence: Synthetic oligonucleotide
  misc_feature 1..20: note = Target: ANGPTL3; (-) strand; PAM type: NRG; PAM sequence: TAG
  source 1..20: mol_type = other DNA
atgttaaagtcaatgtgact

SEQ ID NO: 7794 - DNA, 20 bp, synthetic construct
  misc_feature 1..20: note = Description of Artificial Sequence: Synthetic oligonucleotide
  misc_feature 1..20: note = Target: ANGPTL3; (-) strand; PAM type: NRG; PAM sequence: AAG
  source 1..20: mol_type = other DNA
tatagtgatacctcatgtta

SEQ ID NO: 7795 - DNA, 20 bp, synthetic construct
  misc_feature 1..20: note = Description of Artificial Sequence: Synthetic oligonucleotide
  misc_feature 1..20: note = Target: ANGPTL3; (-) strand; PAM type: NRG; PAM sequence: TAG
  source 1..20: mol_type = other DNA
atattttaacaaataaggta

SEQ ID NO: 7796 - DNA, 20 bp, synthetic construct
  misc_feature 1..20: note = Description of Artificial Sequence: Synthetic oligonucleotide
  misc_feature 1..20: note = Target: ANGPTL3; (-) strand; PAM type: NRG; PAM sequence: AGG
  source 1..20: mol_type = other DNA
agtatatattttaacaaata

SEQ ID NO: 7797 - DNA, 20 bp, synthetic construct
  misc_feature 1..20: note = Description of Artificial Sequence: Synthetic oligonucleotide
  misc_feature 1..20: note = Target: ANGPTL3; (-) strand; PAM type: NRG; PAM sequence: AAG
  source 1..20: mol_type = other DNA
cagtatatattttaacaaat

SEQ ID NO: 7798 - DNA, 20 bp, synthetic construct
  misc_feature 1..20: note = Description of Artificial Sequence: Synthetic oligonucleotide
  misc_feature 1..20: note = Target: ANGPTL3; (-) strand; PAM type: NRG; PAM sequence: CAG
  source 1..20: mol_type = other DNA
taaaatatataaaatgtata

SEQ ID NO: 7799 - DNA, 20 bp, synthetic construct
  misc_feature 1..20: note = Description of Artificial Sequence: Synthetic oligonucleotide
  misc_feature 1..20: note = Target: ANGPTL3; (-) strand; PAM type: NRG; PAM sequence: AAG
  source 1..20: mol_type = other DNA
ttatttgttttcatagtatt

SEQ ID NO: 7800 - DNA, 20 bp, synthetic construct
  misc_feature 1..20: note = Description of Artificial Sequence: Synthetic oligonucleotide
  misc_feature 1..20: note = Target: ANGPTL3; (-) strand; PAM type: NRG; PAM sequence: TAG
  source 1..20: mol_type = other DNA
tttacaattatttgttttca

SEQ ID NO: 7801 - DNA, 20 bp, synthetic construct
  misc_feature 1..20: note = Description of Artificial Sequence: Synthetic oligonucleotide
  misc_feature 1..20: note = Target: ANGPTL3; (-) strand; PAM type: NRG; PAM sequence: AAG
  source 1..20: mol_type = other DNA
cattcttactgtaatctgac

SEQ ID NO: 7802 - DNA, 20 bp, synthetic construct
  misc_feature 1..20: note = Description of Artificial Sequence: Synthetic oligonucleotide
  misc_feature 1..20: note = Target: ANGPTL3; (-) strand; PAM type: NRG; PAM sequence: GGG
  source 1..20: mol_type = other DNA
tagaatcacagcatatttag

SEQ ID NO: 7803 - DNA, 20 bp, synthetic construct
  misc_feature 1..20: note = Description of Artificial Sequence: Synthetic oligonucleotide
  misc_feature 1..20: note = Target: ANGPTL3; (-) strand; PAM type: NRG; PAM sequence: GGG
  source 1..20: mol_type = other DNA
ttagaatcacagcatattta

SEQ ID NO: 7804 - DNA, 20 bp, synthetic construct
  misc_feature 1..20: note = Description of Artificial Sequence: Synthetic oligonucleotide
  misc_feature 1..20: note = Target: ANGPTL3; (-) strand; PAM type: NRG; PAM sequence: AGG
  source 1..20: mol_type = other DNA
attagaatcacagcatattt

SEQ ID NO: 7805 - DNA, 20 bp, synthetic construct
  misc_feature 1..20: note = Description of Artificial Sequence: Synthetic oligonucleotide
  misc_feature 1..20: note = Target: ANGPTL3; (-) strand; PAM type: NRG; PAM sequence: TAG
  source 1..20: mol_type = other DNA
tattagaatcacagcatatt

SEQ ID NO: 7806 - DNA, 20 bp, synthetic construct
  misc_feature 1..20: note = Description of Artificial Sequence: Synthetic oligonucleotide
  misc_feature 1..20: note = Target: ANGPTL3; (-) strand; PAM type: NRG; PAM sequence: CAG
  source 1..20: mol_type = other DNA
acacgaatgtattagaatca

SEQ ID NO: 7807 - DNA, 20 bp, synthetic construct
  misc_feature 1..20: note = Description of Artificial Sequence: Synthetic oligonucleotide
  misc_feature 1..20: note = Target: ANGPTL3; (-) strand; PAM type: NRG; PAM sequence: TAG
  source 1..20: mol_type = other DNA
gaaaacctacacgaatgtat

SEQ ID NO: 7808 - DNA, 20 bp, synthetic construct
  misc_feature 1..20: note = Description of Artificial Sequence: Synthetic oligonucleotide
  misc_feature 1..20: note = Target: ANGPTL3; (-) strand; PAM type: NRG; PAM sequence: AGG
  source 1..20: mol_type = other DNA
acgttcagtaacttgttacg

SEQ ID NO: 7809 - DNA, 20 bp, synthetic construct
  misc_feature 1..20: note = Description of Artificial Sequence: Synthetic oligonucleotide
  misc_feature 1..20: note = Target: ANGPTL3; (-) strand; PAM type: NRG; PAM sequence: GAG
  source 1..20: mol_type = other DNA
aacgttcagtaacttgttac

SEQ ID NO: 7810 - DNA, 20 bp, synthetic construct
  misc_feature 1..20: note = Description of Artificial Sequence: Synthetic oligonucleotide
  misc_feature 1..20: note = Target: ANGPTL3; (-) strand; PAM type: NRG; PAM sequence: CAG
  source 1..20: mol_type = other DNA
tgtcaggctgtttaaacgtt

SEQ ID NO: 7811 - DNA, 20 bp, synthetic construct
  misc_feature 1..20: note = Description of Artificial Sequence: Synthetic oligonucleotide
  misc_feature 1..20: note = Target: ANGPTL3; (-) strand; PAM type: NRG; PAM sequence: AGG
  source 1..20: mol_type = other DNA
aacatatatacatgcttgtc

SEQ ID NO: 7812 - DNA, 20 bp, synthetic construct
  misc_feature 1..20: note = Description of Artificial Sequence: Synthetic oligonucleotide
  misc_feature 1..20: note = Target: ANGPTL3; (-) strand; PAM type: NRG; PAM sequence: CAG
  source 1..20: mol_type = other DNA
aaacatatatacatgcttgt

SEQ ID NO: 7813 - DNA, 20 bp, synthetic construct
  misc_feature 1..20: note = Description of Artificial Sequence: Synthetic oligonucleotide
  misc_feature 1..20: note = Target: ANGPTL3; (-) strand; PAM type: NRG; PAM sequence: GGG
  source 1..20: mol_type = other DNA
atttctataatttagggact

SEQ ID NO: 7814 - DNA, 20 bp, synthetic construct
  misc_feature 1..20: note = Description of Artificial Sequence: Synthetic oligonucleotide
  misc_feature 1..20: note = Target: ANGPTL3; (-) strand; PAM type: NRG; PAM sequence: TGG
  source 1..20: mol_type = other DNA
aatttctataatttagggac

SEQ ID NO: 7815 - DNA, 20 bp, synthetic construct
  misc_feature 1..20: note = Description of Artificial Sequence: Synthetic oligonucleotide
  misc_feature 1..20: note = Target: ANGPTL3; (-) strand; PAM type: NRG; PAM sequence: GGG
  source 1..20: mol_type = other DNA
atttaaatttctataattta

SEQ ID NO: 7816 - DNA, 20 bp, synthetic construct
  misc_feature 1..20: note = Description of Artificial Sequence: Synthetic oligonucleotide
  misc_feature 1..20: note = Target: ANGPTL3; (-) strand; PAM type: NRG; PAM sequence: AGG
  source 1..20: mol_type = other DNA
aatttaaatttctataattt

SEQ ID NO: 7817 - DNA, 20 bp, synthetic construct
  misc_feature 1..20: note = Description of Artificial Sequence: Synthetic oligonucleotide
  misc_feature 1..20: note = Target: ANGPTL3; (-) strand; PAM type: NRG; PAM sequence: TAG
  source 1..20: mol_type = other DNA
taatttaaatttctataatt

SEQ ID NO: 7818 - DNA, 20 bp, synthetic construct
  misc_feature 1..20: note = Description of Artificial Sequence: Synthetic oligonucleotide
  misc_feature 1..20: note = Target: ANGPTL3; (-) strand; PAM type: NRG; PAM sequence: AAG
  source 1..20: mol_type = other DNA
tgtgatgtcgataaacatgc

SEQ ID NO: 7819 - DNA, 20 bp, synthetic construct
  misc_feature 1..20: note = Description of Artificial Sequence: Synthetic oligonucleotide
  misc_feature 1..20: note = Target: ANGPTL3; (-) strand; PAM type: NRG; PAM sequence: GGG
  source 1..20: mol_type = other DNA
tttagggatttagggattta

SEQ ID NO: 7820 - DNA, 20 bp, synthetic construct
  misc_feature 1..20: note = Description of Artificial Sequence: Synthetic oligonucleotide
  misc_feature 1..20: note = Target: ANGPTL3; (-) strand; PAM type: NRG; PAM sequence: AGG
  source 1..20: mol_type = other DNA
ctttagggatttagggattt

SEQ ID NO: 7821 - DNA, 20 bp, synthetic construct
  misc_feature 1..20: note = Description of Artificial Sequence: Synthetic oligonucleotide
  misc_feature 1..20: note = Target: ANGPTL3; (-) strand; PAM type: NRG; PAM sequence: TAG
  source 1..20: mol_type = other DNA
tctttagggatttagggatt

SEQ ID NO: 7822 - DNA, 20 bp, synthetic construct
  misc_feature 1..20: note = Description of Artificial Sequence: Synthetic oligonucleotide
  misc_feature 1..20: note = Target: ANGPTL3; (-) strand; PAM type: NRG; PAM sequence: GGG
  source 1..20: mol_type = other DNA
atctaatctttagggattta

SEQ ID NO: 7823 - DNA, 20 bp, synthetic construct
  misc_feature 1..20: note = Description of Artificial Sequence: Synthetic oligonucleotide
  misc_feature 1..20: note = Target: ANGPTL3; (-) strand; PAM type: NRG; PAM sequence: AGG
  source 1..20: mol_type = other DNA
tatctaatctttagggattt

SEQ ID NO: 7824 - DNA, 20 bp, synthetic construct
  misc_feature 1..20: note = Description of Artificial Sequence: Synthetic oligonucleotide
  misc_feature 1..20: note = Target: ANGPTL3; (-) strand; PAM type: NRG; PAM sequence: TAG
  source 1..20: mol_type = other DNA
gtatctaatctttagggatt

SEQ ID NO: 7825 - DNA, 20 bp, synthetic construct
  misc_feature 1..20: note = Description of Artificial Sequence: Synthetic oligonucleotide
  misc_feature 1..20: note = Target: ANGPTL3; (-) strand; PAM type: NRG; PAM sequence: GGG
  source 1..20: mol_type = other DNA
aaatttgtatctaatcttta

SEQ ID NO: 7826 - DNA, 20 bp, synthetic construct
  misc_feature 1..20: note = Description of Artificial Sequence: Synthetic oligonucleotide
  misc_feature 1..20: note = Target: ANGPTL3; (-) strand; PAM type: NRG; PAM sequence: AGG
  source 1..20: mol_type = other DNA
aaaatttgtatctaatcttt

SEQ ID NO: 7827 - DNA, 20 bp, synthetic construct
  misc_feature 1..20: note = Description of Artificial Sequence: Synthetic oligonucleotide
  misc_feature 1..20: note = Target: ANGPTL3; (-) strand; PAM type: NRG; PAM sequence: TAG
  source 1..20: mol_type = other DNA
aaaaatttgtatctaatctt

SEQ ID NO: 7828 - DNA, 20 bp, synthetic construct
  misc_feature 1..20: note = Description of Artificial Sequence: Synthetic oligonucleotide
  misc_feature 1..20: note = Target: ANGPTL3; (-) strand; PAM type: NRG; PAM sequence: TGG
  source 1..20: mol_type = other DNA
aattctgacaagtgatactg

SEQ ID NO: 7829 - DNA, 20 bp, synthetic construct
  misc_feature 1..20: note = Description of Artificial Sequence: Synthetic oligonucleotide
  misc_feature 1..20: note = Target: ANGPTL3; (-) strand; PAM type: NRG; PAM sequence: AAG
  source 1..20: mol_type = other DNA
atttaaaaataaattctgac

SEQ ID NO: 7830 - DNA, 20 bp, synthetic construct
  misc_feature 1..20: note = Description of Artificial Sequence: Synthetic oligonucleotide
  misc_feature 1..20: note = Target: ANGPTL3; (-) strand; PAM type: NRG; PAM sequence: CAG
  source 1..20: mol_type = other DNA
aatttaaaatttcttactgg

SEQ ID NO: 7831 - DNA, 20 bp, synthetic construct
  misc_feature 1..20: note = Description of Artificial Sequence: Synthetic oligonucleotide
  misc_feature 1..20: note = Target: ANGPTL3; (-) strand; PAM type: NRG; PAM sequence: TGG
  source 1..20: mol_type = other DNA
tttaatttaaaatttcttac

SEQ ID NO: 7832 - DNA, 20 bp, synthetic construct
  misc_feature 1..20: note = Description of Artificial Sequence: Synthetic oligonucleotide
  misc_feature 1..20: note = Target: ANGPTL3; (-) strand; PAM type: NRG; PAM sequence: GGG
  source 1..20: mol_type = other DNA
cactatatcctttaacaaat

SEQ ID NO: 7833 - DNA, 20 bp, synthetic construct
  misc_feature 1..20: note = Description of Artificial Sequence: Synthetic oligonucleotide
  misc_feature 1..20: note = Target: ANGPTL3; (-) strand; PAM type: NRG; PAM sequence: TGG
  source 1..20: mol_type = other DNA
gcactatatcctttaacaaa

SEQ ID NO: 7834 - DNA, 20 bp, synthetic construct
  misc_feature 1..20: note = Description of Artificial Sequence: Synthetic oligonucleotide
  misc_feature 1..20: note = Target: ANGPTL3; (-) strand; PAM type: NRG; PAM sequence: GGG
  source 1..20: mol_type = other DNA
ggtaggtcaccatataactt

SEQ ID NO: 7835 - DNA, 20 bp, synthetic construct
  misc_feature 1..20: note = Description of Artificial Sequence: Synthetic oligonucleotide
  misc_feature 1..20: note = Target: ANGPTL3; (-) strand; PAM type: NRG; PAM sequence: TGG
  source 1..20: mol_type = other DNA
aggtaggtcaccatataact

SEQ ID NO: 7836 - DNA, 20 bp, synthetic construct
  misc_feature 1..20: note = Description of Artificial Sequence: Synthetic oligonucleotide
  misc_feature 1..20: note = Target: ANGPTL3; (-) strand; PAM type: NRG; PAM sequence: AGG
  source 1..20: mol_type = other DNA
tgctaagtattgacaaaggt

SEQ ID NO: 7837 - DNA, 20 bp, synthetic construct
  misc_feature 1..20: note = Description of Artificial Sequence: Synthetic oligonucleotide
  misc_feature 1..20: note = Target: ANGPTL3; (-) strand; PAM type: NRG; PAM sequence: TAG
  source 1..20: mol_type = other DNA
atgctaagtattgacaaagg

SEQ ID NO: 7838 - DNA, 20 bp, synthetic construct
  misc_feature 1..20: note = Description of Artificial Sequence: Synthetic oligonucleotide
  misc_feature 1..20: note = Target: ANGPTL3; (-) strand; PAM type: NRG; PAM sequence: AGG
  source 1..20: mol_type = other DNA
ataatgctaagtattgacaa

SEQ ID NO: 7839 - DNA, 20 bp, synthetic construct
  misc_feature 1..20: note = Description of Artificial Sequence: Synthetic oligonucleotide
  misc_feature 1..20: note = Target: ANGPTL3; (-) strand; PAM type: NRG; PAM sequence: AAG
  source 1..20: mol_type = other DNA
cataatgctaagtattgaca

SEQ ID NO: 7840 - DNA, 20 bp, synthetic construct
  misc_feature 1..20: note = Description of Artificial Sequence: Synthetic oligonucleotide
  misc_feature 1..20: note = Target: ANGPTL3; (-) strand; PAM type: NRG; PAM sequence: AAG
  source 1..20: mol_type = other DNA
aatttgaaatacataatgct

SEQ ID NO: 7841 - DNA, 20 bp, synthetic construct
  misc_feature 1..20: note = Description of Artificial Sequence: Synthetic oligonucleotide
  misc_feature 1..20: note = Target: ANGPTL3; (-) strand; PAM type: NRG; PAM sequence: TGG
  source 1..20: mol_type = other DNA
aatatatatgacatgtatat

SEQ ID NO: 7842 - DNA, 20 bp, synthetic construct
  misc_feature 1..20: note = Description of Artificial Sequence: Synthetic oligonucleotide
  misc_feature 1..20: note = Target: ANGPTL3; (-) strand; PAM type: NRG; PAM sequence: TAG
  source 1..20: mol_type = other DNA
atatttacttaggattcaca

SEQ ID NO: 7843 - DNA, 20 bp, synthetic construct
  misc_feature 1..20: note = Description of Artificial Sequence: Synthetic oligonucleotide
  misc_feature 1..20: note = Target: ANGPTL3; (-) strand; PAM type: NRG; PAM sequence: AGG
  source 1..20: mol_type = other DNA
ctggaacaaaatatttactt

SEQ ID NO: 7844 - DNA, 20 bp, synthetic construct
  misc_feature 1..20: note = Description of Artificial Sequence: Synthetic oligonucleotide
  misc_feature 1..20: note = Target: ANGPTL3; (-) strand; PAM type: NRG; PAM sequence: TAG
  source 1..20: mol_type = other DNA
tctggaacaaaatatttact

SEQ ID NO: 7845 - DNA, 20 bp, synthetic construct
  misc_feature 1..20: note = Description of Artificial Sequence: Synthetic oligonucleotide
  misc_feature 1..20: note = Target: ANGPTL3; (-) strand; PAM type: NRG; PAM sequence: TGG
  source 1..20: mol_type = other DNA
tttattattttgtacttttc

SEQ ID NO: 7846 - DNA, 20 bp, synthetic construct
  misc_feature 1..20: note = Description of Artificial Sequence: Synthetic oligonucleotide
  misc_feature 1..20: note = Target: ANGPTL3; (-) strand; PAM type: NRG; PAM sequence: TAG
  source 1..20: mol_type = other DNA
gtctgtggtcctgaaaatta

SEQ ID NO: 7847 - DNA, 20 bp, synthetic construct
  misc_feature 1..20: note = Description of Artificial Sequence: Synthetic oligonucleotide
  misc_feature 1..20: note = Target: ANGPTL3; (-) strand; PAM type: NRG; PAM sequence: TGG
  source 1..20: mol_type = other DNA
aatttcgacagcttagtctg

SEQ ID NO: 7848 - DNA, 20 bp, synthetic construct
  misc_feature 1..20: note = Description of Artificial Sequence: Synthetic oligonucleotide
  misc_feature 1..20: note = Target: ANGPTL3; (-) strand; PAM type: NRG; PAM sequence: TAG
  source 1..20: mol_type = other DNA
cagcgttaatttcgacagct

SEQ ID NO: 7849 - DNA, 20 bp, synthetic construct
  misc_feature 1..20: note = Description of Artificial Sequence: Synthetic oligonucleotide
  misc_feature 1..20: note = Target: ANGPTL3; (-) strand; PAM type: NRG; PAM sequence: CAG
  source 1..20: mol_type = other DNA
aaaatcagcgttaatttcga

SEQ ID NO: 7850 - DNA, 20 bp, synthetic construct
  misc_feature 1..20: note = Description of Artificial Sequence: Synthetic oligonucleotide
  misc_feature 1..20: note = Target: ANGPTL3; (-) strand; PAM type: NRG; PAM sequence: CAG
  source 1..20: mol_type = other DNA
tattctggccctaaaaaaat

SEQ ID NO: 7851 - DNA, 20 bp, synthetic construct
  misc_feature 1..20: note = Description of Artificial Sequence: Synthetic oligonucleotide
  misc_feature 1..20: note = Target: ANGPTL3; (-) strand; PAM type: NRG; PAM sequence: TGG
  source 1..20: mol_type = other DNA
gaggagccattttggtattc

SEQ ID NO: 7852 - DNA, 20 bp, synthetic construct
  misc_feature 1..20: note = Description of Artificial Sequence: Synthetic oligonucleotide
  misc_feature 1..20: note = Target: ANGPTL3; (-) strand; PAM type: NRG; PAM sequence: TGG
  source 1..20: mol_type = other DNA
ggggaagagaggagccattt

SEQ ID NO: 7853 - DNA, 20 bp, synthetic construct
  misc_feature 1..20: note = Description of Artificial Sequence: Synthetic oligonucleotide
  misc_feature 1..20: note = Target: ANGPTL3; (-) strand; PAM type: NRG; PAM sequence: GAG
  source 1..20: mol_type = other DNA
ccaattttgggggaagagag

SEQ ID NO: 7854 - DNA, 20 bp, synthetic construct
  misc_feature 1..20: note = Description of Artificial Sequence: Synthetic oligonucleotide
  misc_feature 1..20: note = Target: ANGPTL3; (-) strand; PAM type: NRG; PAM sequence: AGG
  source 1..20: mol_type = other DNA
gtccaattttgggggaagag

SEQ ID NO: 7855 - DNA, 20 bp, synthetic construct
  misc_feature 1..20: note = Description of Artificial Sequence: Synthetic oligonucleotide
  misc_feature 1..20: note = Target: ANGPTL3; (-) strand; PAM type: NRG; PAM sequence: GAG
  source 1..20: mol_type = other DNA
tgtccaattttgggggaaga

SEQ ID NO: 7856 - DNA, 20 bp, synthetic construct
  misc_feature 1..20: note = Description of Artificial Sequence: Synthetic oligonucleotide
  misc_feature 1..20: note = Target: ANGPTL3; (-) strand; PAM type: NRG; PAM sequence: GAG
  source 1..20: mol_type = other DNA
attgtccaattttgggggaa

SEQ ID NO: 7857 - DNA, 20 bp, synthetic construct
  misc_feature 1..20: note = Description of Artificial Sequence: Synthetic oligonucleotide
  misc_feature 1..20: note = Target: ANGPTL3; (-) strand; PAM type: NRG; PAM sequence: AAG
  source 1..20: mol_type = other DNA
aaattgtccaattttggggg

SEQ ID NO: 7858 - DNA, 20 bp, synthetic construct
  misc_feature 1..20: note = Description of Artificial Sequence: Synthetic oligonucleotide
  misc_feature 1..20: note = Target: ANGPTL3; (-) strand; PAM type: NRG; PAM sequence: GGG
  source 1..20: mol_type = other DNA
ttgaaattgtccaattttgg

SEQ ID NO: 7859 - DNA, 20 bp, synthetic construct
  misc_feature 1..20: note = Description of Artificial Sequence: Synthetic oligonucleotide
  misc_feature 1..20: note = Target: ANGPTL3; (-) strand; PAM type: NRG; PAM sequence: GGG
  source 1..20: mol_type = other DNA
tttgaaattgtccaattttg

SEQ ID NO: 7860 - DNA, 20 bp, synthetic construct
  misc_feature 1..20: note = Description of Artificial Sequence: Synthetic oligonucleotide
  misc_feature 1..20: note = Target: ANGPTL3; (-) strand; PAM type: NRG; PAM sequence: GGG
  source 1..20: mol_type = other DNA
atttgaaattgtccaatttt

SEQ ID NO: 7861 - DNA, 20 bp, synthetic construct
  misc_feature 1..20: note = Description of Artificial Sequence: Synthetic oligonucleotide
  misc_feature 1..20: note = Target: ANGPTL3; (-) strand; PAM type: NRG; PAM sequence: TGG
  source 1..20: mol_type = other DNA
catttgaaattgtccaattt

SEQ ID NO: 7862 - DNA, 20 bp, synthetic construct
  misc_feature 1..20: note = Description of Artificial Sequence: Synthetic oligonucleotide
  misc_feature 1..20: note = Target: ANGPTL3; (-) strand; PAM type: NRG; PAM sequence: AAG
  source 1..20: mol_type = other DNA
ttaaggaaaccaaatagagg

SEQ ID NO: 7863 - DNA, 20 bp, synthetic construct
  misc_feature 1..20: note = Description of Artificial Sequence: Synthetic oligonucleotide
  misc_feature 1..20: note = Target: ANGPTL3; (-) strand; PAM type: NRG; PAM sequence: AGG
  source 1..20: mol_type = other DNA
tttttaaggaaaccaaatag

SEQ ID NO: 7864 - DNA, 20 bp, synthetic construct
  misc_feature 1..20: note = Description of Artificial Sequence: Synthetic oligonucleotide
  misc_feature 1..20: note = Target: ANGPTL3; (-) strand; PAM type: NRG; PAM sequence: GAG
  source 1..20: mol_type = other DNA
ttttttaaggaaaccaaata

SEQ ID NO: 7865 - DNA, 20 bp, synthetic construct
  misc_feature 1..20: note = Description of Artificial Sequence: Synthetic oligonucleotide
  misc_feature 1..20: note = Target: ANGPTL3; (-) strand; PAM type: NRG; PAM sequence: TAG
  source 1..20: mol_type = other DNA
ttttttttaaggaaaccaaa

SEQ ID NO: 7866 - DNA, 20 bp, synthetic construct
  misc_feature 1..20: note = Description of Artificial Sequence: Synthetic oligonucleotide
  misc_feature 1..20: note = Target: ANGPTL3; (-) strand; PAM type: NRG; PAM sequence: AGG
  source 1..20: mol_type = other DNA
gagagtttttttttttttta

SEQ ID NO: 7867 - DNA, 20 bp, synthetic construct
  misc_feature 1..20: note = Description of Artificial Sequence: Synthetic oligonucleotide
  misc_feature 1..20: note = Target: ANGPTL3; (-) strand; PAM type: NRG; PAM sequence: AAG
  source 1..20: mol_type = other DNA
tgagagtttttttttttttt

SEQ ID NO: 7868 - DNA, 20 bp, synthetic construct
  misc_feature 1..20: note = Description of Artificial Sequence: Synthetic oligonucleotide
  misc_feature 1..20: note = Target: ANGPTL3; (-) strand; PAM type: NRG; PAM sequence: GAG
  source 1..20: mol_type = other DNA
aaatgaaacatgtcctatga

SEQ ID NO: 7869 - DNA, 20 bp, synthetic construct
  misc_feature 1..20: note = Description of Artificial Sequence: Synthetic oligonucleotide
  misc_feature 1..20: note = Target: ANGPTL3; (-) strand; PAM type: NRG; PAM sequence: GAG
  source 1..20: mol_type = other DNA
caaaatgaaacatgtcctat

SEQ ID NO: 7870 - DNA, 20 bp, synthetic construct
  misc_feature 1..20: note = Description of Artificial Sequence: Synthetic oligonucleotide
  misc_feature 1..20: note = Target: ANGPTL3; (-) strand; PAM type: NRG; PAM sequence: AGG
  source 1..20: mol_type = other DNA
tctaatttactactcctgaa

SEQ ID NO: 7871 - DNA, 20 bp, synthetic construct
  misc_feature 1..20: note = Description of Artificial Sequence: Synthetic oligonucleotide
  misc_feature 1..20: note = Target: ANGPTL3; (-) strand; PAM type: NRG; PAM sequence: AAG
  source 1..20: mol_type = other DNA
gtctaatttactactcctga

SEQ ID NO: 7872 - DNA, 20 bp, synthetic construct
  misc_feature 1..20: note = Description of Artificial Sequence: Synthetic oligonucleotide
  misc_feature 1..20: note = Target: ANGPTL3; (-) strand; PAM type: NRG; PAM sequence: GGG
  source 1..20: mol_type = other DNA
gtagaaaaaagctttatatg

SEQ ID NO: 7873 - DNA, 20 bp, synthetic construct
  misc_feature 1..20: note = Description of Artificial Sequence: Synthetic oligonucleotide
  misc_feature 1..20: note = Target: ANGPTL3; (-) strand; PAM type: NRG; PAM sequence: GGG
  source 1..20: mol_type = other DNA
ggtagaaaaaagctttatat

SEQ ID NO: 7874 - DNA, 20 bp, synthetic construct
  misc_feature 1..20: note = Description of Artificial Sequence: Synthetic oligonucleotide
  misc_feature 1..20: note = Target: ANGPTL3; (-) strand; PAM type: NRG; PAM sequence: TGG
  source 1..20: mol_type = other DNA
tggtagaaaaaagctttata

SEQ ID NO: 7875 - DNA, 20 bp, synthetic construct
  misc_feature 1..20: note = Description of Artificial Sequence: Synthetic oligonucleotide
  misc_feature 1..20: note = Target: ANGPTL3; (-) strand; PAM type: NRG; PAM sequence: AAG
  source 1..20: mol_type = other DNA
agtatctttctggtagaaaa

SEQ ID NO: 7876 - DNA, 20 bp, synthetic construct
  misc_feature 1..20: note = Description of Artificial Sequence: Synthetic oligonucleotide
  misc_feature 1..20: note = Target: ANGPTL3; (-) strand; PAM type: NRG; PAM sequence: TAG
  source 1..20: mol_type = other DNA
taccagaagtatctttctgg

SEQ ID NO: 7877 - DNA, 20 bp, synthetic construct
  misc_feature 1..20: note = Description of Artificial Sequence: Synthetic oligonucleotide
  misc_feature 1..20: note = Target: ANGPTL3; (-) strand; PAM type: NRG; PAM sequence: TGG
  source 1..20: mol_type = other DNA
ttctaccagaagtatctttc

SEQ ID NO: 7878 - DNA, 20 bp, synthetic construct
  misc_feature 1..20: note = Description of Artificial Sequence: Synthetic oligonucleotide
  misc_feature 1..20: note = Target: ANGPTL3; (-) strand; PAM type: NRG; PAM sequence: AAG
  source 1..20: mol_type = other DNA
cctttctcttcttctaccag

SEQ ID NO: 7879 - DNA, 20 bp, synthetic construct
  misc_feature 1..20: note = Description of Artificial Sequence: Synthetic oligonucleotide
  misc_feature 1..20: note = Target: ANGPTL3; (-) strand; PAM type: NRG; PAM sequence: CAG
  source 1..20: mol_type = other DNA
gctcctttctcttcttctac

SEQ ID NO: 7880 - DNA, 20 bp, synthetic construct
  misc_feature 1..20: note = Description of Artificial Sequence: Synthetic oligonucleotide
  misc_feature 1..20: note = Target: ANGPTL3; (-) strand; PAM type: NRG; PAM sequence: GAG
  source 1..20: mol_type = other DNA
acagtcgtgtgaaccataaa

SEQ ID NO: 7881 - DNA, 20 bp, synthetic construct
  misc_feature 1..20: note = Description of Artificial Sequence: Synthetic oligonucleotide
  misc_feature 1..20: note = Target: ANGPTL3; (-) strand; PAM type: NRG; PAM sequence: AAG
  source 1..20: mol_type = other DNA
agacagtcgtgtgaaccata

SEQ ID NO: 7882 - DNA, 20 bp, synthetic construct
  misc_feature 1..20: note = Description of Artificial Sequence: Synthetic oligonucleotide
  misc_feature 1..20: note = Target: ANGPTL3; (-) strand; PAM type: NRG; PAM sequence: CAG
  source 1..20: mol_type = other DNA
aaagtagttaggacaggaga

SEQ ID NO: 7883 - DNA, 20 bp, synthetic construct
  misc_feature 1..20: note = Description of Artificial Sequence: Synthetic oligonucleotide
  misc_feature 1..20: note = Target: ANGPTL3; (-) strand; PAM type: NRG; PAM sequence: GAG
  source 1..20: mol_type = other DNA
aagcaaagtagttaggacag

SEQ ID NO: 7884 - DNA, 20 bp, synthetic construct
  misc_feature 1..20: note = Description of Artificial Sequence: Synthetic oligonucleotide
  misc_feature 1..20: note = Target: ANGPTL3; (-) strand; PAM type: NRG; PAM sequence: AGG
  source 1..20: mol_type = other DNA
ttaagcaaagtagttaggac

SEQ ID NO: 7885 - DNA, 20 bp, synthetic construct
  misc_feature 1..20: note = Description of Artificial Sequence: Synthetic oligonucleotide
  misc_feature 1..20: note = Target: ANGPTL3; (-) strand; PAM type: NRG; PAM sequence: CAG
  source 1..20: mol_type = other DNA
tttaagcaaagtagttagga

SEQ ID NO: 7886 - DNA, 20 bp, synthetic construct
  misc_feature 1..20: note = Description of Artificial Sequence: Synthetic oligonucleotide
  misc_feature 1..20: note = Target: ANGPTL3; (-) strand; PAM type: NRG; PAM sequence: AGG
  source 1..20: mol_type = other DNA
gcactttaagcaaagtagtt

SEQ ID NO: 7887 - DNA, 20 bp, synthetic construct
  misc_feature 1..20: note = Description of Artificial Sequence: Synthetic oligonucleotide
  misc_feature 1..20: note = Target: ANGPTL3; (-) strand; PAM type: NRG; PAM sequence: TAG
  source 1..20: mol_type = other DNA
agcactttaagcaaagtagt

SEQ ID NO: 7888 - DNA, 20 bp, synthetic construct
  misc_feature 1..20: note = Description of Artificial Sequence: Synthetic oligonucleotide
  misc_feature 1..20: note = Target: ANGPTL3; (-) strand; PAM type: NRG; PAM sequence: TAG
  source 1..20: mol_type = other DNA
tttgagcactttaagcaaag

SEQ ID NO: 7889 - DNA, 20 bp, synthetic construct
  misc_feature 1..20: note = Description of Artificial Sequence: Synthetic oligonucleotide
  misc_feature 1..20: note = Target: ANGPTL3; (-) strand; PAM type: NRG; PAM sequence: AAG
  source 1..20: mol_type = other DNA
gaatttgagcactttaagca

SEQ ID NO: 7890 - DNA, 20 bp, synthetic construct
  misc_feature 1..20: note = Description of Artificial Sequence: Synthetic oligonucleotide
  misc_feature 1..20: note = Target: ANGPTL3; (-) strand; PAM type: NRG; PAM sequence: AAG
  source 1..20: mol_type = other DNA
tgatggaatttgagcacttt

SEQ ID NO: 7891 - DNA, 20 bp, synthetic construct
  misc_feature 1..20: note = Description of Artificial Sequence: Synthetic oligonucleotide
  misc_feature 1..20: note = Target: ANGPTL3; (-) strand; PAM type: NRG; PAM sequence: GAG
  source 1..20: mol_type = other DNA
tgtgagtagtgatggaattt

SEQ ID NO: 7892 - DNA, 20 bp, synthetic construct
  misc_feature 1..20: note = Description of Artificial Sequence: Synthetic oligonucleotide
  misc_feature 1..20: note = Target: ANGPTL3; (-) strand; PAM type: NRG; PAM sequence: TGG
  source 1..20: mol_type = other DNA
tagacaactgtgagtagtga

SEQ ID NO: 7893 - DNA, 20 bp, synthetic construct
  misc_feature 1..20: note = Description of Artificial Sequence: Synthetic oligonucleotide
  misc_feature 1..20: note = Target: ANGPTL3; (-) strand; PAM type: NRG; PAM sequence: TAG
  source 1..20: mol_type = other DNA
ttagattagacaactgtgag

SEQ ID NO: 7894 - DNA, 20 bp, synthetic construct
  misc_feature 1..20: note = Description of Artificial Sequence: Synthetic oligonucleotide
  misc_feature 1..20: note = Target: ANGPTL3; (-) strand; PAM type: NRG; PAM sequence: GAG
  source 1..20: mol_type = other DNA
gacttagattagacaactgt

SEQ ID NO: 7895 - DNA, 20 bp, synthetic construct
  misc_feature 1..20: note = Description of Artificial Sequence: Synthetic oligonucleotide
  misc_feature 1..20: note = Target: ANGPTL3; (-) strand; PAM type: NRG; PAM sequence: TAG
  source 1..20: mol_type = other DNA
aaaggggattagacttagat

SEQ ID NO: 7896 - DNA, 20 bp, synthetic construct
  misc_feature 1..20: note = Description of Artificial Sequence: Synthetic oligonucleotide
  misc_feature 1..20: note = Target: ANGPTL3; (-) strand; PAM type: NRG; PAM sequence: TAG
  source 1..20: mol_type = other DNA
agatcaaaggggattagact

SEQ ID NO: 7897 - DNA, 20 bp, synthetic construct
  misc_feature 1..20: note = Description of Artificial Sequence: Synthetic oligonucleotide
  misc_feature 1..20: note = Target: ANGPTL3; (-) strand; PAM type: NRG; PAM sequence: TAG
  source 1..20: mol_type = other DNA
tctgagagatcaaaggggat

SEQ ID NO: 7898 - DNA, 20 bp, synthetic construct
  misc_feature 1..20: note = Description of Artificial Sequence: Synthetic oligonucleotide
  misc_feature 1..20: note = Target: ANGPTL3; (-) strand; PAM type: NRG; PAM sequence: GGG
  source 1..20: mol_type = other DNA
ggtagtctgagagatcaaag

SEQ ID NO: 7899 - DNA, 20 bp, synthetic construct
  misc_feature 1..20: note = Description of Artificial Sequence: Synthetic oligonucleotide
  misc_feature 1..20: note = Target: ANGPTL3; (-) strand; PAM type: NRG; PAM sequence: GGG
  source 1..20: mol_type = other DNA
aggtagtctgagagatcaaa

SEQ ID NO: 7900 - DNA, 20 bp, synthetic construct
  misc_feature 1..20: note = Description of Artificial Sequence: Synthetic oligonucleotide
  misc_feature 1..20: note = Target: ANGPTL3; (-) strand; PAM type: NRG; PAM sequence: AGG
  source 1..20: mol_type = other DNA
aaggtagtctgagagatcaa

SEQ ID NO: 7901 - DNA, 20 bp, synthetic construct
  misc_feature 1..20: note = Description of Artificial Sequence: Synthetic oligonucleotide
  misc_feature 1..20: note = Target: ANGPTL3; (-) strand; PAM type: NRG; PAM sequence: AAG
  source 1..20: mol_type = other DNA
gaaggtagtctgagagatca

SEQ ID NO: 7902 - DNA, 20 bp, synthetic construct
  misc_feature 1..20: note = Description of Artificial Sequence: Synthetic oligonucleotide
  misc_feature 1..20: note = Target: ANGPTL3; (-) strand; PAM type: NRG; PAM sequence: GAG
  source 1..20: mol_type = other DNA
taaaagggaaggtagtctga

SEQ ID NO: 7903 - DNA, 20 bp, synthetic construct
  misc_feature 1..20: note = Description of Artificial Sequence: Synthetic oligonucleotide
  misc_feature 1..20: note = Target: ANGPTL3; (-) strand; PAM type: NRG; PAM sequence: GAG
  source 1..20: mol_type = other DNA
gataaaagggaaggtagtct

SEQ ID NO: 7904 - DNA, 20 bp, synthetic construct
  misc_feature 1..20: note = Description of Artificial Sequence: Synthetic oligonucleotide
  misc_feature 1..20: note = Target: ANGPTL3; (-) strand; PAM type: NRG; PAM sequence: TAG
  source 1..20: mol_type = other DNA
tagagagataaaagggaagg

SEQ ID NO: 7905 - DNA, 20 bp, synthetic construct
  misc_feature 1..20: note = Description of Artificial Sequence: Synthetic oligonucleotide
  misc_feature 1..20: note = Target: ANGPTL3; (-) strand; PAM type: NRG; PAM sequence: AGG
  source 1..20: mol_type = other DNA
tagtagagagataaaaggga

SEQ ID NO: 7906 - DNA, 20 bp, synthetic construct
  misc_feature 1..20: note = Description of Artificial Sequence: Synthetic oligonucleotide
  misc_feature 1..20: note = Target: ANGPTL3; (-) strand; PAM type: NRG; PAM sequence: AAG
  source 1..20: mol_type = other DNA
gtagtagagagataaaaggg

SEQ ID NO: 7907 - DNA, 20 bp, synthetic construct
  misc_feature 1..20: note = Description of Artificial Sequence: Synthetic oligonucleotide
  misc_feature 1..20: note = Target: ANGPTL3; (-) strand; PAM type: NRG; PAM sequence: GGG
  source 1..20: mol_type = other DNA
taagtagtagagagataaaa

SEQ ID NO: 7908 - DNA, 20 bp, synthetic construct
  misc_feature 1..20: note = Description of Artificial Sequence: Synthetic oligonucleotide
  misc_feature 1..20: note = Target: ANGPTL3; (-) strand; PAM type: NRG; PAM sequence: AGG
  source 1..20: mol_type = other DNA
ttaagtagtagagagataaa

SEQ ID NO: 7909 - DNA, 20 bp, synthetic construct
  misc_feature 1..20: note = Description of Artificial Sequence: Synthetic oligonucleotide
  misc_feature 1..20: note = Target: ANGPTL3; (-) strand; PAM type: NRG; PAM sequence: AAG
  source 1..20: mol_type = other DNA
attaagtagtagagagataa

SEQ ID NO: 7910 - DNA, 20 bp, synthetic construct
  misc_feature 1..20: note = Description of Artificial Sequence: Synthetic oligonucleotide
  misc_feature 1..20: note = Target: ANGPTL3; (-) strand; PAM type: NRG; PAM sequence: GAG
  source 1..20: mol_type = other DNA
tcttattattaagtagtaga

SEQ ID NO: 7911 - DNA, 20 bp, synthetic construct
  misc_feature 1..20: note = Description of Artificial Sequence: Synthetic oligonucleotide
  misc_feature 1..20: note = Target: ANGPTL3; (-) strand; PAM type: NRG; PAM sequence: GAG
  source 1..20: mol_type = other DNA
attcttattattaagtagta

SEQ ID NO: 7912 - DNA, 20 bp, synthetic construct
  misc_feature 1..20: note = Description of Artificial Sequence: Synthetic oligonucleotide
  misc_feature 1..20: note = Target: ANGPTL3; (-) strand; PAM type: NRG; PAM sequence: TAG
  source 1..20: mol_type = other DNA
atattcttattattaagtag

SEQ ID NO: 7913 - DNA, 20 bp, synthetic construct
  misc_feature 1..20: note = Description of Artificial Sequence: Synthetic oligonucleotide
  misc_feature 1..20: note = Target: ANGPTL3; (-) strand; PAM type: NRG; PAM sequence: TAG
  source 1..20: mol_type = other DNA
aagatattcttattattaag

SEQ ID NO: 7914 - DNA, 20 bp, synthetic construct
  misc_feature 1..20: note = Description of Artificial Sequence: Synthetic oligonucleotide
  misc_feature 1..20: note = Target: ANGPTL3; (-) strand; PAM type: NRG; PAM sequence: AAG
  source 1..20: mol_type = other DNA
aaaaagatattcttattatt

SEQ ID NO: 7915 - DNA, 20 bp, synthetic construct
  misc_feature 1..20: note = Description of Artificial Sequence: Synthetic oligonucleotide
  misc_feature 1..20: note = Target: ANGPTL3; (-) strand; PAM type: NRG; PAM sequence: AAG
  source 1..20: mol_type = other DNA
tgaaggtcaagtttgaaaaa

SEQ ID NO: 7916 - DNA, 20 bp, synthetic construct
  misc_feature 1..20: note = Description of Artificial Sequence: Synthetic oligonucleotide
  misc_feature 1..20: note = Target: ANGPTL3; (-) strand; PAM type: NRG; PAM sequence: AAG
  source 1..20: mol_type = other DNA
gtgaaagcaaaatgaaggtc

SEQ ID NO: 7917 - DNA, 20 bp, synthetic construct
  misc_feature 1..20: note = Description of Artificial Sequence: Synthetic oligonucleotide
  misc_feature 1..20: note = Target: ANGPTL3; (-) strand; PAM type: NRG; PAM sequence: AGG
  source 1..20: mol_type = other DNA
gtattgtgaaagcaaaatga

SEQ ID NO: 7918 - DNA, 20 bp, synthetic construct
  misc_feature 1..20: note = Description of Artificial Sequence: Synthetic oligonucleotide
  misc_feature 1..20: note = Target: ANGPTL3; (-) strand; PAM type: NRG; PAM sequence: AAG
  source 1..20: mol_type = other DNA
agtattgtgaaagcaaaatg

SEQ ID NO: 7919 - DNA, 20 bp, synthetic construct
  misc_feature 1..20: note = Description of Artificial Sequence: Synthetic oligonucleotide
  misc_feature 1..20: note = Target: ANGPTL3; (-) strand; PAM type: NRG; PAM sequence: AAG
  source 1..20: mol_type = other DNA
tggagagtatagtattgtga

SEQ ID NO: 7920 - DNA, 20 bp, synthetic construct
  misc_feature 1..20: note = Description of Artificial Sequence: Synthetic oligonucleotide
  misc_feature 1..20: note = Target: ANGPTL3; (-) strand; PAM type: NRG; PAM sequence: TAG
  source 1..20: mol_type = other DNA
gggataatccatggagagta

SEQ ID NO: 7921 - DNA, 20 bp, synthetic construct
  misc_feature 1..20: note = Description of Artificial Sequence: Synthetic oligonucleotide
  misc_feature 1..20: note = Target: ANGPTL3; (-) strand; PAM type: NRG; PAM sequence: GAG
  source 1..20: mol_type = other DNA
gataagggataatccatgga

SEQ ID NO: 7922 - DNA, 20 bp, synthetic construct
  misc_feature 1..20: note = Description of Artificial Sequence: Synthetic oligonucleotide
  misc_feature 1..20: note = Target: ANGPTL3; (-) strand; PAM type: NRG; PAM sequence: GAG
  source 1..20: mol_type = other DNA
cagataagggataatccatg

SEQ ID NO: 7923 - DNA, 20 bp, synthetic construct
  misc_feature 1..20: note = Description of Artificial Sequence: Synthetic oligonucleotide
  misc_feature 1..20: note = Target: ANGPTL3; (-) strand; PAM type: NRG; PAM sequence: TGG
  source 1..20: mol_type = other DNA
ttcagataagggataatcca

SEQ ID NO: 7924 - DNA, 20 bp, synthetic construct
  misc_feature 1..20: note = Description of Artificial Sequence: Synthetic oligonucleotide
  misc_feature 1..20: note = Target: ANGPTL3; (-) strand; PAM type: NRG; PAM sequence: GGG
  source 1..20: mol_type = other DNA
ataaagatggattcagataa

SEQ ID NO: 7925 - DNA, 20 bp, synthetic construct
  misc_feature 1..20: note = Description of Artificial Sequence: Synthetic oligonucleotide
  misc_feature 1..20: note = Target: ANGPTL3; (-) strand; PAM type: NRG; PAM sequence: AGG
  source 1..20: mol_type = other DNA
tataaagatggattcagata

SEQ ID NO: 7926 - DNA, 20 bp, synthetic construct
  misc_feature 1..20: note = Description of Artificial Sequence: Synthetic oligonucleotide
  misc_feature 1..20: note = Target: ANGPTL3; (-) strand; PAM type: NRG; PAM sequence: AAG
  source 1..20: mol_type = other DNA
ttataaagatggattcagat

SEQ ID NO: 7927 - DNA, 20 bp, synthetic construct
  misc_feature 1..20: note = Description of Artificial Sequence: Synthetic oligonucleotide
  misc_feature 1..20: note = Target: ANGPTL3; (-) strand; PAM type: NRG; PAM sequence: CAG
  source 1..20: mol_type = other DNA
tagggttataaagatggatt

SEQ ID NO: 7928 - DNA, 20 bp, synthetic construct
  misc_feature 1..20: note = Description of Artificial Sequence: Synthetic oligonucleotide
  misc_feature 1..20: note = Target: ANGPTL3; (-) strand; PAM type: NRG; PAM sequence: TGG
  source 1..20: mol_type = other DNA
aaggaatagggttataaaga

SEQ ID NO: 7929 - DNA, 20 bp, synthetic construct
  misc_feature 1..20: note = Description of Artificial Sequence: Synthetic oligonucleotide
  misc_feature 1..20: note = Target: ANGPTL3; (-) strand; PAM type: NRG; PAM sequence: AAG
  source 1..20: mol_type = other DNA
gagaaaggaatagggttata

SEQ ID NO: 7930 - DNA, 20 bp, synthetic construct
  misc_feature 1..20: note = Description of Artificial Sequence: Synthetic oligonucleotide
  misc_feature 1..20: note = Target: ANGPTL3; (-) strand; PAM type: NRG; PAM sequence: GGG
  source 1..20: mol_type = other DNA
ctaaatatgagaaaggaata

SEQ ID NO: 7931 - DNA, 20 bp, synthetic construct
  misc_feature 1..20: note = Description of Artificial Sequence: Synthetic oligonucleotide
  misc_feature 1..20: note = Target: ANGPTL3; (-) strand; PAM type: NRG; PAM sequence: AGG
  source 1..20: mol_type = other DNA
actaaatatgagaaaggaat

SEQ ID NO: 7932 - DNA, 20 bp, synthetic construct
  misc_feature 1..20: note = Description of Artificial Sequence: Synthetic oligonucleotide
  misc_feature 1..20: note = Target: ANGPTL3; (-) strand; PAM type: NRG; PAM sequence: TAG
  source 1..20: mol_type = other DNA
tactaaatatgagaaaggaa

SEQ ID NO: 7933 - DNA, 20 bp, synthetic construct
  misc_feature 1..20: note = Description of Artificial Sequence: Synthetic oligonucleotide
  misc_feature 1..20: note = Target: ANGPTL3; (-) strand; PAM type: NRG; PAM sequence: AGG
  source 1..20: mol_type = other DNA
cacagtactaaatatgagaa

SEQ ID NO: 7934 - DNA, 20 bp, synthetic construct
  misc_feature 1..20: note = Description of Artificial Sequence: Synthetic oligonucleotide
  misc_feature 1..20: note = Target: ANGPTL3; (-) strand; PAM type: NRG; PAM sequence: AAG
  source 1..20: mol_type = other DNA
ccacagtactaaatatgaga

SEQ ID NO: 7935 - DNA, 20 bp, synthetic construct
  misc_feature 1..20: note = Description of Artificial Sequence: Synthetic oligonucleotide
  misc_feature 1..20: note = Target: ANGPTL3; (-) strand; PAM type: NRG; PAM sequence: GAG
  source 1..20: mol_type = other DNA
tggcccacagtactaaatat

SEQ ID NO: 7936 - DNA, 20 bp, synthetic construct
  misc_feature 1..20: note = Description of Artificial Sequence: Synthetic oligonucleotide
  misc_feature 1..20: note = Target: ANGPTL3; (-) strand; PAM type: NRG; PAM sequence: CAG
  source 1..20: mol_type = other DNA
gaaggttgtccattggccca

SEQ ID NO: 7937 - DNA, 20 bp, synthetic construct
  misc_feature 1..20: note = Description of Artificial Sequence: Synthetic oligonucleotide
  misc_feature 1..20: note = Target: ANGPTL3; (-) strand; PAM type: NRG; PAM sequence: TGG
  source 1..20: mol_type = other DNA
gatgattgaaggttgtccat

SEQ ID NO: 7938 - DNA, 20 bp, synthetic construct
  misc_feature 1..20: note = Description of Artificial Sequence: Synthetic oligonucleotide
  misc_feature 1..20: note = Target: ANGPTL3; (-) strand; PAM type: NRG; PAM sequence: AGG
  source 1..20: mol_type = other DNA
agtgtagaaaagatgattga

SEQ ID NO: 7939 - DNA, 20 bp, synthetic construct
  misc_feature 1..20: note = Description of Artificial Sequence: Synthetic oligonucleotide
  misc_feature 1..20: note = Target: ANGPTL3; (-) strand; PAM type: NRG; PAM sequence: AAG
  source 1..20: mol_type = other DNA
cagtgtagaaaagatgattg

SEQ ID NO: 7940 - DNA, 20 bp, synthetic construct
  misc_feature 1..20: note = Description of Artificial Sequence: Synthetic oligonucleotide
  misc_feature 1..20: note = Target: ANGPTL3; (-) strand; PAM type: NRG; PAM sequence: AAG
  source 1..20: mol_type = other DNA
gtctgagggtcagtgtagaa

SEQ ID NO: 7941 - DNA, 20 bp, synthetic construct
  misc_feature 1..20: note = Description of Artificial Sequence: Synthetic oligonucleotide
  misc_feature 1..20: note = Target: ANGPTL3; (-) strand; PAM type: NRG; PAM sequence: TAG
  source 1..20: mol_type = other DNA
agaatgtctgagggtcagtg

SEQ ID NO: 7942 - DNA, 20 bp, synthetic construct
  misc_feature 1..20: note = Description of Artificial Sequence: Synthetic oligonucleotide
  misc_feature 1..20: note = Target: ANGPTL3; (-) strand; PAM type: NRG; PAM sequence: CAG
  source 1..20: mol_type = other DNA
cagatagaatgtctgagggt

SEQ ID NO: 7943 - DNA, 20 bp, synthetic construct
  misc_feature 1..20: note = Description of Artificial Sequence: Synthetic oligonucleotide
  misc_feature 1..20: note = Target: ANGPTL3; (-) strand; PAM type: NRG; PAM sequence: GGG
  source 1..20: mol_type = other DNA
agagcagatagaatgtctga

SEQ ID NO: 7944 - DNA, 20 bp, synthetic construct
  misc_feature 1..20: note = Description of Artificial Sequence: Synthetic oligonucleotide
  misc_feature 1..20: note = Target: ANGPTL3; (-) strand; PAM type: NRG; PAM sequence: AGG
  source 1..20: mol_type = other DNA
gagagcagatagaatgtctg

SEQ ID NO: 7945 - DNA, 20 bp, synthetic construct
  misc_feature 1..20: note = Description of Artificial Sequence: Synthetic oligonucleotide
  misc_feature 1..20: note = Target: ANGPTL3; (-) strand; PAM type: NRG; PAM sequence: GAG
  source 1..20: mol_type = other DNA
tgagagcagatagaatgtct

SEQ ID NO: 7946 - DNA, 20 bp, synthetic construct
  misc_feature 1..20: note = Description of Artificial Sequence: Synthetic oligonucleotide
  misc_feature 1..20: note = Target: ANGPTL3; (-) strand; PAM type: NRG; PAM sequence: TAG
  source 1..20: mol_type = other DNA
aaggagtccgtgagagcaga

SEQ ID NO: 7947 - DNA, 20 bp, synthetic construct
  misc_feature 1..20: note = Description of Artificial Sequence: Synthetic oligonucleotide
  misc_feature 1..20: note = Target: ANGPTL3; (-) strand; PAM type: NRG; PAM sequence: CAG
  source 1..20: mol_type = other DNA
aataaaggagtccgtgagag

SEQ ID NO: 7948 - DNA, 20 bp, synthetic construct
  misc_feature 1..20: note = Description of Artificial Sequence: Synthetic oligonucleotide
  misc_feature 1..20: note = Target: ANGPTL3; (-) strand; PAM type: NRG; PAM sequence: GAG
  source 1..20: mol_type = other DNA
gtaaataaaggagtccgtga

SEQ ID NO: 7949 - DNA, 20 bp, synthetic construct
  misc_feature 1..20: note = Description of Artificial Sequence: Synthetic oligonucleotide
  misc_feature 1..20: note = Target: ANGPTL3; (-) strand; PAM type: NRG; PAM sequence: GAG
  source 1..20: mol_type = other DNA
tggtaaataaaggagtccgt

SEQ ID NO: 7950 - DNA, 20 bp, synthetic construct
  misc_feature 1..20: note = Description of Artificial Sequence: Synthetic oligonucleotide
  misc_feature 1..20: note = Target: ANGPTL3; (-) strand; PAM type: NRG; PAM sequence: GAG
  source 1..20: mol_type = other DNA
tttattcatggtaaataaag

SEQ ID NO: 7951 - DNA, 20 bp, synthetic construct
  misc_feature 1..20: note = Description of Artificial Sequence: Synthetic oligonucleotide
  misc_feature 1..20: note = Target: ANGPTL3; (-) strand; PAM type: NRG; PAM sequence: AGG
  source 1..20: mol_type = other DNA
actttattcatggtaaataa

SEQ ID NO: 7952 - DNA, 20 bp, synthetic construct
  misc_feature 1..20: note = Description of Artificial Sequence: Synthetic oligonucleotide
  misc_feature 1..20: note = Target: ANGPTL3; (-) strand; PAM type: NRG; PAM sequence: AAG
  source 1..20: mol_type = other DNA
aactttattcatggtaaata

SEQ ID NO: 7953 - DNA, 20 bp, synthetic construct
  misc_feature 1..20: note = Description of Artificial Sequence: Synthetic oligonucleotide
  misc_feature 1..20: note = Target: ANGPTL3; (-) strand; PAM type: NRG; PAM sequence: TGG
  source 1..20: mol_type = other DNA
agattttggaactttattca

SEQ ID NO: 7954 - DNA, 20 bp, synthetic construct
  misc_feature 1..20: note = Description of Artificial Sequence: Synthetic oligonucleotide
  misc_feature 1..20: note = Target: ANGPTL3; (-) strand; PAM type: NRG; PAM sequence: TGG
  source 1..20: mol_type = other DNA
tgggatgaatatgtagattt

SEQ ID NO: 7955 - DNA, 20 bp, synthetic construct
  misc_feature 1..20: note = Description of Artificial Sequence: Synthetic oligonucleotide
  misc_feature 1..20: note = Target: ANGPTL3; (-) strand; PAM type: NRG; PAM sequence: TAG
  source 1..20: mol_type = other DNA
agagacttgggatgaatatg

SEQ ID NO: 7956 - DNA, 20 bp, synthetic construct
  misc_feature 1..20: note = Description of Artificial Sequence: Synthetic oligonucleotide
  misc_feature 1..20: note = Target: ANGPTL3; (-) strand; PAM type: NRG; PAM sequence: GGG
  source 1..20: mol_type = other DNA
ggggaactggaaagagactt

SEQ ID NO: 7957 - DNA, 20 bp, synthetic construct
  misc_feature 1..20: note = Description of Artificial Sequence: Synthetic oligonucleotide
  misc_feature 1..20: note = Target: ANGPTL3; (-) strand; PAM type: NRG; PAM sequence: TGG
  source 1..20: mol_type = other DNA
aggggaactggaaagagact

SEQ ID NO: 7958 - DNA, 20 bp, synthetic construct
  misc_feature 1..20: note = Description of Artificial Sequence: Synthetic oligonucleotide
  misc_feature 1..20: note = Target: ANGPTL3; (-) strand; PAM type: NRG; PAM sequence: GAG
  source 1..20: mol_type = other DNA
gtaagaaggggaactggaaa

SEQ ID NO: 7959 - DNA, 20 bp, synthetic construct
  misc_feature 1..20: note = Description of Artificial Sequence: Synthetic oligonucleotide
  misc_feature 1..20: note = Target: ANGPTL3; (-) strand; PAM type: NRG; PAM sequence: AAG
  source 1..20: mol_type = other DNA
atgtaagaaggggaactgga

SEQ ID NO: 7960 - DNA, 20 bp, synthetic construct
  misc_feature 1..20: note = Description of Artificial Sequence: Synthetic oligonucleotide
  misc_feature 1..20: note = Target: ANGPTL3; (-) strand; PAM type: NRG; PAM sequence: TGG
  source 1..20: mol_type = other DNA
ggcaatgtaagaaggggaac

SEQ ID NO: 7961 - DNA, 20 bp, synthetic construct
  misc_feature 1..20: note = Description of Artificial Sequence: Synthetic oligonucleotide
  misc_feature 1..20: note = Target: ANGPTL3; (-) strand; PAM type: NRG; PAM sequence: GGG
  source 1..20: mol_type = other DNA
caaataggcaatgtaagaag

SEQ ID NO: 7962 - DNA, 20 bp, synthetic construct
  misc_feature 1..20: note = Description of Artificial Sequence: Synthetic oligonucleotide
  misc_feature 1..20: note = Target: ANGPTL3; (-) strand; PAM type: NRG; PAM sequence: GGG
  source 1..20: mol_type = other DNA
gcaaataggcaatgtaagaa

SEQ ID NO: 7963 - DNA, 20 bp, synthetic construct
  misc_feature 1..20: note = Description of Artificial Sequence: Synthetic oligonucleotide
  misc_feature 1..20: note = Target: ANGPTL3; (-) strand; PAM type: NRG; PAM sequence: AGG
  source 1..20: mol_type = other DNA
ggcaaataggcaatgtaaga

SEQ ID NO: 7964 - DNA, 20 bp, synthetic construct
  misc_feature 1..20: note = Description of Artificial Sequence: Synthetic oligonucleotide
  misc_feature 1..20: note = Target: ANGPTL3; (-) strand; PAM type: NRG; PAM sequence: AAG
  source 1..20: mol_type = other DNA
tggcaaataggcaatgtaag

SEQ ID NO: 7965 - DNA, 20 bp, synthetic construct
  misc_feature 1..20: note = Description of Artificial Sequence: Synthetic oligonucleotide
  misc_feature 1..20: note = Target: ANGPTL3; (-) strand; PAM type: NRG; PAM sequence: AAG
  source 1..20: mol_type = other DNA
aaatggcaaataggcaatgt

SEQ ID NO: 7966 - DNA, 20 bp, synthetic construct
  misc_feature 1..20: note = Description of Artificial Sequence: Synthetic oligonucleotide
  misc_feature 1..20: note = Target: ANGPTL3; (-) strand; PAM type: NRG; PAM sequence: AGG
  source 1..20: mol_type = other DNA
tgaagggagaaatggcaaat

SEQ ID NO: 7967 - DNA, 20 bp, synthetic construct
  misc_feature 1..20: note = Description of Artificial Sequence: Synthetic oligonucleotide
  misc_feature 1..20: note = Target: ANGPTL3; (-) strand; PAM type: NRG; PAM sequence: TAG
  source 1..20: mol_type = other DNA
ttgaagggagaaatggcaaa

SEQ ID NO: 7968 - DNA, 20 bp, synthetic construct
  misc_feature 1..20: note = Description of Artificial Sequence: Synthetic oligonucleotide
  misc_feature 1..20: note = Target: ANGPTL3; (-) strand; PAM type: NRG; PAM sequence: TGG
  source 1..20: mol_type = other DNA
tagggtattgaagggagaaa

SEQ ID NO: 7969 - DNA, 20 bp, synthetic construct
  misc_feature 1..20: note = Description of Artificial Sequence: Synthetic oligonucleotide
  misc_feature 1..20: note = Target: ANGPTL3; (-) strand; PAM type: NRG; PAM sequence: GAG
  source 1..20: mol_type = other DNA
gaagtatagggtattgaagg

SEQ ID NO: 7970 - DNA, 20 bp, synthetic construct
  misc_feature 1..20: note = Description of Artificial Sequence: Synthetic oligonucleotide
  misc_feature 1..20: note = Target: ANGPTL3; (-) strand; PAM type: NRG; PAM sequence: GGG
  source 1..20: mol_type = other DNA
gtgaagtatagggtattgaa

SEQ ID NO: 7971 - DNA, 20 bp, synthetic construct
  misc_feature 1..20: note = Description of Artificial Sequence: Synthetic oligonucleotide
  misc_feature 1..20: note = Target: ANGPTL3; (-) strand; PAM type: NRG; PAM sequence: AGG
  source 1..20: mol_type = other DNA
agtgaagtatagggtattga

SEQ ID NO: 7972 - DNA, 20 bp, synthetic construct
  misc_feature 1..20: note = Description of Artificial Sequence: Synthetic oligonucleotide
  misc_feature 1..20: note = Target: ANGPTL3; (-) strand; PAM type: NRG; PAM sequence: AAG
  source 1..20: mol_type = other DNA
gagtgaagtatagggtattg

SEQ ID NO: 7973 - DNA, 20 bp, synthetic construct
  misc_feature 1..20: note = Description of Artificial Sequence: Synthetic oligonucleotide
  misc_feature 1..20: note = Target: ANGPTL3; (-) strand; PAM type: NRG; PAM sequence: GGG
  source 1..20: mol_type = other DNA
ttgaatttgagtgaagtata

SEQ ID NO: 7974 - DNA, 20 bp, synthetic construct
  misc_feature 1..20: note = Description of Artificial Sequence: Synthetic oligonucleotide
  misc_feature 1..20: note = Target: ANGPTL3; (-) strand; PAM type: NRG; PAM sequence: AGG
  source 1..20: mol_type = other DNA
gttgaatttgagtgaagtat

SEQ ID NO: 7975 - DNA, 20 bp, synthetic construct
  misc_feature 1..20: note = Description of Artificial Sequence: Synthetic oligonucleotide
  misc_feature 1..20: note = Target: ANGPTL3; (-) strand; PAM type: NRG; PAM sequence: TAG
  source 1..20: mol_type = other DNA
tgttgaatttgagtgaagta

SEQ ID NO: 7976 - DNA, 20 bp, synthetic construct
  misc_feature 1..20: note = Description of Artificial Sequence: Synthetic oligonucleotide
  misc_feature 1..20: note = Target: ANGPTL3; (-) strand; PAM type: NRG; PAM sequence: AAG
  source 1..20: mol_type = other DNA
tggtatgttgaatttgagtg

SEQ ID NO: 7977 - DNA, 20 bp, synthetic construct
  misc_feature 1..20: note = Description of Artificial Sequence: Synthetic oligonucleotide
  misc_feature 1..20: note = Target: ANGPTL3; (-) strand; PAM type: NRG; PAM sequence: GAG
  source 1..20: mol_type = other DNA
atttttggtatgttgaattt

SEQ ID NO: 7978 - DNA, 20 bp, synthetic construct
  misc_feature 1..20: note = Description of Artificial Sequence: Synthetic oligonucleotide
  misc_feature 1..20: note = Target: ANGPTL3; (-) strand; PAM type: NRG; PAM sequence: TGG
  source 1..20: mol_type = other DNA
cgtgcctggccttttatttt

SEQ ID NO: 7979 - DNA, 20 bp, synthetic construct
  misc_feature 1..20: note = Description of Artificial Sequence: Synthetic oligonucleotide
  misc_feature 1..20: note = Target: ANGPTL3; (-) strand; PAM type: NRG; PAM sequence: TGG
  source 1..20: mol_type = other DNA
caggtgtgagccaccgtgcc

SEQ ID NO: 7980 - DNA, 20 bp, synthetic construct
  misc_feature 1..20: note = Description of Artificial Sequence: Synthetic oligonucleotide
  misc_feature 1..20: note = Target: ANGPTL3; (-) strand; PAM type: NRG; PAM sequence: GAG
  source 1..20: mol_type = other DNA
agtcctgggattacaggtgt

SEQ ID NO: 7981 - DNA, 20 bp, synthetic construct
  misc_feature 1..20: note = Description of Artificial Sequence: Synthetic oligonucleotide
  misc_feature 1..20: note = Target: ANGPTL3; (-) strand; PAM type: NRG; PAM sequence: AGG
  source 1..20: mol_type = other DNA
tcccaaagtcctgggattac

SEQ ID NO: 7982 - DNA, 20 bp, synthetic construct
  misc_feature 1..20: note = Description of Artificial Sequence: Synthetic oligonucleotide
  misc_feature 1..20: note = Target: ANGPTL3; (-) strand; PAM type: NRG; PAM sequence: CAG
  source 1..20: mol_type = other DNA
ctcccaaagtcctgggatta

SEQ ID NO: 7983 - DNA, 20 bp, synthetic construct
  misc_feature 1..20: note = Description of Artificial Sequence: Synthetic oligonucleotide
  misc_feature 1..20: note = Target: ANGPTL3; (-) strand; PAM type: NRG; PAM sequence: GGG
  source 1..20: mol_type = other DNA
cctcagcctcccaaagtcct

SEQ ID NO: 7984 - DNA, 20 bp, synthetic construct
  misc_feature 1..20: note = Description of Artificial Sequence: Synthetic oligonucleotide
  misc_feature 1..20: note = Target: ANGPTL3; (-) strand; PAM type: NRG; PAM sequence: TGG
  source 1..20: mol_type = other DNA
gcctcagcctcccaaagtcc

SEQ ID NO: 7985 - DNA, 20 bp, synthetic construct
  misc_feature 1..20: note = Description of Artificial Sequence: Synthetic oligonucleotide
  misc_feature 1..20: note = Target: ANGPTL3; (-) strand; PAM type: NRG; PAM sequence: AAG
  source 1..20: mol_type = other DNA
ccacctgcctcagcctccca

SEQ ID NO: 7986 - DNA, 20 bp, synthetic construct
  misc_feature 1..20: note = Description of Artificial Sequence: Synthetic oligonucleotide
  misc_feature 1..20: note = Target: ANGPTL3; (-) strand; PAM type: NRG; PAM sequence: CAG
  source 1..20: mol_type = other DNA
ctcaggtgatccacctgcct

SEQ ID NO: 7987 - DNA, 20 bp, synthetic construct
  misc_feature 1..20: note = Description of Artificial Sequence: Synthetic oligonucleotide
  misc_feature 1..20: note = Target: ANGPTL3; (-) strand; PAM type: NRG; PAM sequence: AGG
  source 1..20: mol_type = other DNA
ctggtcagactcctgacctc

SEQ ID NO: 7988 - DNA, 20 bp, synthetic construct
  misc_feature 1..20: note = Description of Artificial Sequence: Synthetic oligonucleotide
  misc_feature 1..20: note = Target: ANGPTL3; (-) strand; PAM type: NRG; PAM sequence: CAG
  source 1..20: mol_type = other DNA
gctggtcagactcctgacct

SEQ ID NO: 7989 - DNA, 20 bp, synthetic construct
  misc_feature 1..20: note = Description of Artificial Sequence: Synthetic oligonucleotide
  misc_feature 1..20: note = Target: ANGPTL3; (-) strand; PAM type: NRG; PAM sequence: CAG
  source 1..20: mol_type = other DNA
accatattggtcaggctggt

SEQ ID NO: 7990 - DNA, 20 bp, synthetic construct
  misc_feature 1..20: note = Description of Artificial Sequence: Synthetic oligonucleotide
  misc_feature 1..20: note = Target: ANGPTL3; (-) strand; PAM type: NRG; PAM sequence: TGG
  source 1..20: mol_type = other DNA
tttcaccatattggtcaggc

SEQ ID NO: 7991 - DNA, 20 bp, synthetic construct
  misc_feature 1..20: note = Description of Artificial Sequence: Synthetic oligonucleotide
  misc_feature 1..20: note = Target: ANGPTL3; (-) strand; PAM type: NRG; PAM sequence: AGG
  source 1..20: mol_type = other DNA
ggggtttcaccatattggtc

SEQ ID NO: 7992 - DNA, 20 bp, synthetic construct
  misc_feature 1..20: note = Description of Artificial Sequence: Synthetic oligonucleotide
  misc_feature 1..20: note = Target: ANGPTL3; (-) strand; PAM type: NRG; PAM sequence: CAG
  source 1..20: mol_type = other DNA
cggggtttcaccatattggt

SEQ ID NO: 7993 - DNA, 20 bp, synthetic construct
  misc_feature 1..20: note = Description of Artificial Sequence: Synthetic oligonucleotide
  misc_feature 1..20: note = Target: ANGPTL3; (-) strand; PAM type: NRG; PAM sequence: TGG
  source 1..20: mol_type = other DNA
gagacggggtttcaccatat

SEQ ID NO: 7994 - DNA, 20 bp, synthetic construct
  misc_feature 1..20: note = Description of Artificial Sequence: Synthetic oligonucleotide
  misc_feature 1..20: note = Target: ANGPTL3; (-) strand; PAM type: NRG; PAM sequence: GGG
  source 1..20: mol_type = other DNA
ttgtattttaggtagagacg

SEQ ID NO: 7995 - DNA, 20 bp, synthetic construct
  misc_feature 1..20: note = Description of Artificial Sequence: Synthetic oligonucleotide
  misc_feature 1..20: note = Target: ANGPTL3; (-) strand; PAM type: NRG; PAM sequence: GGG
  source 1..20: mol_type = other DNA
tttgtattttaggtagagac

SEQ ID NO: 7996 - DNA, 20 bp, synthetic construct
  misc_feature 1..20: note = Description of Artificial Sequence: Synthetic oligonucleotide
  misc_feature 1..20: note = Target: ANGPTL3; (-) strand; PAM type: NRG; PAM sequence: CGG
  source 1..20: mol_type = other DNA
ttttgtattttaggtagaga

SEQ ID NO: 7997 - DNA, 20 bp, synthetic construct
  misc_feature 1..20: note = Description of Artificial Sequence: Synthetic oligonucleotide
  misc_feature 1..20: note = Target: ANGPTL3; (-) strand; PAM type: NRG; PAM sequence: GAG
  source 1..20: mol_type = other DNA
taatttttgtattttaggta

SEQ ID NO: 7998 - DNA, 20 bp, synthetic construct
  misc_feature 1..20: note = Description of Artificial Sequence: Synthetic oligonucleotide
  misc_feature 1..20: note = Target: ANGPTL3; (-) strand; PAM type: NRG; PAM sequence: TAG
  source 1..20: mol_type = other DNA
gctaatttttgtattttagg

SEQ ID NO: 7999 - DNA, 20 bp, synthetic construct
  misc_feature 1..20: note = Description of Artificial Sequence: Synthetic oligonucleotide
  misc_feature 1..20: note = Target: ANGPTL3; (-) strand; PAM type: NRG; PAM sequence: AGG
  source 1..20: mol_type = other DNA
ctggctaatttttgtatttt

SEQ ID NO: 8000 - DNA, 20 bp, synthetic construct
  misc_feature 1..20: note = Description of Artificial Sequence: Synthetic oligonucleotide
  misc_feature 1..20: note = Target: ANGPTL3; (-) strand; PAM type: NRG; PAM sequence: TAG
  source 1..20: mol_type = other DNA
cctggctaatttttgtattt

SEQ ID NO: 8001 - DNA, 20 bp, synthetic construct
  misc_feature 1..20: note = Description of Artificial Sequence: Synthetic oligonucleotide
  misc_feature 1..20: note = Target: ANGPTL3; (-) strand; PAM type: NRG; PAM sequence: TGG
  source 1..20: mol_type = other DNA
taggcacatgccaccacgcc

SEQ ID NO: 8002 - DNA, 20 bp, synthetic construct
  misc_feature 1..20: note = Description of Artificial Sequence: Synthetic oligonucleotide
  misc_feature 1..20: note = Target: ANGPTL3; (-) strand; PAM type: NRG; PAM sequence: AGG
  source 1..20: mol_type = other DNA
tcttgagtagctgggactgt

SEQ ID NO: 8003 - DNA, 20 bp, synthetic construct
  misc_feature 1..20: note = Description of Artificial Sequence: Synthetic oligonucleotide
  misc_feature 1..20: note = Target: ANGPTL3; (-) strand; PAM type: NRG; PAM sequence: TAG
  source 1..20: mol_type = other DNA
ctcttgagtagctgggactg

SEQ ID NO: 8004 - DNA, 20 bp, synthetic construct
  misc_feature 1..20: note = Description of Artificial Sequence: Synthetic oligonucleotide
  misc_feature 1..20: note = Target: ANGPTL3; (-) strand; PAM type: NRG; PAM sequence: GGG
  source 1..20: mol_type = other DNA
tctcagcctcttgagtagct

SEQ ID NO: 8005 - DNA, 20 bp, synthetic construct
  misc_feature 1..20: note = Description of Artificial Sequence: Synthetic oligonucleotide
  misc_feature 1..20: note = Target: ANGPTL3; (-) strand; PAM type: NRG; PAM sequence: TGG
  source 1..20: mol_type = other DNA
gtctcagcctcttgagtagc

SEQ ID NO: 8006 - DNA, 20 bp, synthetic construct
  misc_feature 1..20: note = Description of Artificial Sequence: Synthetic oligonucleotide
  misc_feature 1..20: note = Target: ANGPTL3; (-) strand; PAM type: NRG; PAM sequence: TAG
  source 1..20: mol_type = other DNA
tcctgtctcagcctcttgag

SEQ ID NO: 8007 - DNA, 20 bp, synthetic construct
  misc_feature 1..20: note = Description of Artificial Sequence: Synthetic oligonucleotide
  misc_feature 1..20: note = Target: ANGPTL3; (-) strand; PAM type: NRG; PAM sequence: GAG
  source 1..20: mol_type = other DNA
ttctcctgtctcagcctctt

SEQ ID NO: 8008 - DNA, 20 bp, synthetic construct
  misc_feature 1..20: note = Description of Artificial Sequence: Synthetic oligonucleotide
  misc_feature 1..20: note = Target: ANGPTL3; (-) strand; PAM type: NRG; PAM sequence: CAG
  source 1..20: mol_type = other DNA
ttcaagcgattctcctgtct

SEQ ID NO: 8009 - DNA, 20 bp, synthetic construct
  misc_feature 1..20: note = Description of Artificial Sequence: Synthetic oligonucleotide
  misc_feature 1..20: note = Target: ANGPTL3; (-) strand; PAM type: NRG; PAM sequence: AAG
  source 1..20: mol_type = other DNA
aacctccgcctcctgggttc

SEQ ID NO: 8010 - DNA, 20 bp, synthetic construct
  misc_feature 1..20: note = Description of Artificial Sequence: Synthetic oligonucleotide
  misc_feature 1..20: note = Target: ANGPTL3; (-) strand; PAM type: NRG; PAM sequence: GGG
  source 1..20: mol_type = other DNA
cactgcaacctccgcctcct

SEQ ID NO: 8011 - DNA, 20 bp, synthetic construct
  misc_feature 1..20: note = Description of Artificial Sequence: Synthetic oligonucleotide
  misc_feature 1..20: note = Target: ANGPTL3; (-) strand; PAM type: NRG; PAM sequence: TGG
  source 1..20: mol_type = other DNA
tcactgcaacctccgcctcc

SEQ ID NO: 8012 - DNA, 20 bp, synthetic construct
  misc_feature 1..20: note = Description of Artificial Sequence: Synthetic oligonucleotide
  misc_feature 1..20: note = Target: ANGPTL3; (-) strand; PAM type: NRG; PAM sequence: CAG
  source 1..20: mol_type = other DNA
ccagtgcattggtgtgatct

SEQ ID NO: 8013 - DNA, 20 bp, synthetic construct
  misc_feature 1..20: note = Description of Artificial Sequence: Synthetic oligonucleotide
  misc_feature 1..20: note = Target: ANGPTL3; (-) strand; PAM type: NRG; PAM sequence: TGG
  source 1..20: mol_type = other DNA
tgttctgtcacccagtgcat

SEQ ID NO: 8014 - DNA, 20 bp, synthetic construct
  misc_feature 1..20: note = Description of Artificial Sequence: Synthetic oligonucleotide
  misc_feature 1..20: note = Target: ANGPTL3; (-) strand; PAM type: NRG; PAM sequence: CAG
  source 1..20: mol_type = other DNA
gtcagtcttgttctgtcacc

SEQ ID NO: 8015 - DNA, 20 bp, synthetic construct
  misc_feature 1..20: note = Description of Artificial Sequence: Synthetic oligonucleotide
  misc_feature 1..20: note = Target: ANGPTL3; (-) strand; PAM type: NRG; PAM sequence: CAG
  source 1..20: mol_type = other DNA
ttatttatttttttttgagt

SEQ ID NO: 8016 - DNA, 20 bp, synthetic construct
  misc_feature 1..20: note = Description of Artificial Sequence: Synthetic oligonucleotide
  misc_feature 1..20: note = Target: ANGPTL3; (-) strand; PAM type: NRG; PAM sequence: GAG
  source 1..20: mol_type = other DNA
tttgttatttattttttttt

SEQ ID NO: 8017 - DNA, 20 bp, synthetic construct
  misc_feature 1..20: note = Description of Artificial Sequence: Synthetic oligonucleotide
  misc_feature 1..20: note = Target: ANGPTL3; (-) strand; PAM type: NRG; PAM sequence: GGG
  source 1..20: mol_type = other DNA
gcagtagcagtaaggggctg

SEQ ID NO: 8018 - DNA, 20 bp, synthetic construct
  misc_feature 1..20: note = Description of Artificial Sequence: Synthetic oligonucleotide
  misc_feature 1..20: note = Target: ANGPTL3; (-) strand; PAM type: NRG; PAM sequence: GGG
  source 1..20: mol_type = other DNA
agcagtagcagtaaggggct

SEQ ID NO: 8019 - DNA, 20 bp, synthetic construct
  misc_feature 1..20: note = Description of Artificial Sequence: Synthetic oligonucleotide
  misc_feature 1..20: note = Target: ANGPTL3; (-) strand; PAM type: NRG; PAM sequence: TGG
  source 1..20: mol_type = other DNA
tagcagtagcagtaaggggc

SEQ ID NO: 8020 - DNA, 20 bp, synthetic construct
  misc_feature 1..20: note = Description of Artificial Sequence: Synthetic oligonucleotide
  misc_feature 1..20: note = Target: ANGPTL3; (-) strand; PAM type: NRG; PAM sequence: GGG
  source 1..20: mol_type = other DNA
gggatagcagtagcagtaag

SEQ ID NO: 8021 - DNA, 20 bp, synthetic construct
  misc_feature 1..20: note = Description of Artificial Sequence: Synthetic oligonucleotide
  misc_feature 1..20: note = Target: ANGPTL3; (-) strand; PAM type: NRG; PAM sequence: GGG
  source 1..20: mol_type = other DNA
agggatagcagtagcagtaa

SEQ ID NO: 8022 - DNA, 20 bp, synthetic construct
  misc_feature 1..20: note = Description of Artificial Sequence: Synthetic oligonucleotide
  misc_feature 1..20: note = Target: ANGPTL3; (-) strand; PAM type: NRG; PAM sequence: AGG
  source 1..20: mol_type = other DNA
aagggatagcagtagcagta

SEQ ID NO: 8023 - DNA, 20 bp, synthetic construct
  misc_feature 1..20: note = Description of Artificial Sequence: Synthetic oligonucleotide
  misc_feature 1..20: note = Target: ANGPTL3; (-) strand; PAM type: NRG; PAM sequence: AAG
  source 1..20: mol_type = other DNA
aaagggatagcagtagcagt

SEQ ID NO: 8024 - DNA, 20 bp, synthetic construct
  misc_feature 1..20: note = Description of Artificial Sequence: Synthetic oligonucleotide
  misc_feature 1..20: note = Target: ANGPTL3; (-) strand; PAM type: NRG; PAM sequence: CAG
  source 1..20: mol_type = other DNA
gtagaaagggatagcagtag

SEQ ID NO: 8025 - DNA, 20 bp, synthetic construct
  misc_feature 1..20: note = Description of Artificial Sequence: Synthetic oligonucleotide
  misc_feature 1..20: note = Target: ANGPTL3; (-) strand; PAM type: NRG; PAM sequence: TAG
  source 1..20: mol_type = other DNA
tgggtagaaagggatagcag

SEQ ID NO: 8026 - DNA, 20 bp, synthetic construct
  misc_feature 1..20: note = Description of Artificial Sequence: Synthetic oligonucleotide
  misc_feature 1..20: note = Target: ANGPTL3; (-) strand; PAM type: NRG; PAM sequence: CAG
  source 1..20: mol_type = other DNA
aggtgggtagaaagggatag

SEQ ID NO: 8027 - DNA, 20 bp, synthetic construct
  misc_feature 1..20: note = Description of Artificial Sequence: Synthetic oligonucleotide
  misc_feature 1..20: note = Target: ANGPTL3; (-) strand; PAM type: NRG; PAM sequence: TAG
  source 1..20: mol_type = other DNA
gaaaggtgggtagaaaggga

SEQ ID NO: 8028 - DNA, 20 bp, synthetic construct
  misc_feature 1..20: note = Description of Artificial Sequence: Synthetic oligonucleotide
  misc_feature 1..20: note = Target: ANGPTL3; (-) strand; PAM type: NRG; PAM sequence: GGG
  source 1..20: mol_type = other DNA
gagggaaaggtgggtagaaa

SEQ ID NO: 8029 - DNA, 20 bp, synthetic construct
  misc_feature 1..20: note = Description of Artificial Sequence: Synthetic oligonucleotide
  misc_feature 1..20: note = Target: ANGPTL3; (-) strand; PAM type: NRG; PAM sequence: AGG
  source 1..20: mol_type = other DNA
ggagggaaaggtgggtagaa

SEQ ID NO: 8030 - DNA, 20 bp, synthetic construct
  misc_feature 1..20: note = Description of Artificial Sequence: Synthetic oligonucleotide
  misc_feature 1..20: note = Target: ANGPTL3; (-) strand; PAM type: NRG; PAM sequence: AAG
  source 1..20: mol_type = other DNA
aggagggaaaggtgggtaga

SEQ ID NO: 8031 - DNA, 20 bp, synthetic construct
  misc_feature 1..20: note = Description of Artificial Sequence: Synthetic oligonucleotide
  misc_feature 1..20: note = Target: ANGPTL3; (-) strand; PAM type: NRG; PAM sequence: TAG
  source 1..20: mol_type = other DNA
ataaaggagggaaaggtggg

SEQ ID NO: 8032 - DNA, 20 bp, synthetic construct
  misc_feature 1..20: note = Description of Artificial Sequence: Synthetic oligonucleotide
  misc_feature 1..20: note = Target: ANGPTL3; (-) strand; PAM type: NRG; PAM sequence: GGG
  source 1..20: mol_type = other DNA
agtataaaggagggaaaggt

SEQ ID NO: 8033 - DNA, 20 bp, synthetic construct
  misc_feature 1..20: note = Description of Artificial Sequence: Synthetic oligonucleotide
  misc_feature 1..20: note = Target: ANGPTL3; (-) strand; PAM type: NRG; PAM sequence: TGG
  source 1..20: mol_type = other DNA
gagtataaaggagggaaagg

SEQ ID NO: 8034 - DNA, 20 bp, synthetic construct
  misc_feature 1..20: note = Description of Artificial Sequence: Synthetic oligonucleotide
  misc_feature 1..20: note = Target: ANGPTL3; (-) strand; PAM type: NRG; PAM sequence: AGG
  source 1..20: mol_type = other DNA
aaagagtataaaggagggaa

SEQ ID NO: 8035 - DNA, 20 bp, synthetic construct
  misc_feature 1..20: note = Description of Artificial Sequence: Synthetic oligonucleotide
  misc_feature 1..20: note = Target: ANGPTL3; (-) strand; PAM type: NRG; PAM sequence: AAG
  source 1..20: mol_type = other DNA
gaaagagtataaaggaggga

SEQ ID NO: 8036 - DNA, 20 bp, synthetic construct
  misc_feature 1..20: note = Description of Artificial Sequence: Synthetic oligonucleotide
  misc_feature 1..20: note = Target: ANGPTL3; (-) strand; PAM type: NRG; PAM sequence: GGG
  source 1..20: mol_type = other DNA
gtgtgaaagagtataaagga

SEQ ID NO: 8037 - DNA, 20 bp, synthetic construct
  misc_feature 1..20: note = Description of Artificial Sequence: Synthetic oligonucleotide
  misc_feature 1..20: note = Target: ANGPTL3; (-) strand; PAM type: NRG; PAM sequence: AGG
  source 1..20: mol_type = other DNA
ggtgtgaaagagtataaagg

SEQ ID NO: 8038 - DNA, 20 bp, synthetic construct
  misc_feature 1..20: note = Description of Artificial Sequence: Synthetic oligonucleotide
  misc_feature 1..20: note = Target: ANGPTL3; (-) strand; PAM type: NRG; PAM sequence: GAG
  source 1..20: mol_type = other DNA
tggtgtgaaagagtataaag

SEQ ID NO: 8039 - DNA, 20 bp, synthetic construct
  misc_feature 1..20: note = Description of Artificial Sequence: Synthetic oligonucleotide
  misc_feature 1..20: note = Target: ANGPTL3; (-) strand; PAM type: NRG; PAM sequence: AGG
  source 1..20: mol_type = other DNA
gatggtgtgaaagagtataa

SEQ ID NO: 8040 - DNA, 20 bp, synthetic construct
  misc_feature 1..20: note = Description of Artificial Sequence: Synthetic oligonucleotide
  misc_feature 1..20: note = Target: ANGPTL3; (-) strand; PAM type: NRG; PAM sequence: AAG
  source 1..20: mol_type = other DNA
agatggtgtgaaagagtata

SEQ ID NO: 8041 - DNA, 20 bp, synthetic construct
  misc_feature 1..20: note = Description of Artificial Sequence: Synthetic oligonucleotide
  misc_feature 1..20: note = Target: ANGPTL3; (-) strand; PAM type: NRG; PAM sequence: GAG
  source 1..20: mol_type = other DNA
gtgaggaagatggtgtgaaa

SEQ ID NO: 8042 - DNA, 20 bp, synthetic construct
  misc_feature 1..20: note = Description of Artificial Sequence: Synthetic oligonucleotide
  misc_feature 1..20: note = Target: ANGPTL3; (-) strand; PAM type: NRG; PAM sequence: AAG
  source 1..20: mol_type = other DNA
aagtgaggaagatggtgtga

SEQ ID NO: 8043 - DNA, 20 bp, synthetic construct
  misc_feature 1..20: note = Description of Artificial Sequence: Synthetic oligonucleotide
  misc_feature 1..20: note = Target: ANGPTL3; (-) strand; PAM type: NRG; PAM sequence: TGG
  source 1..20: mol_type = other DNA
atataaagaagtgaggaaga

SEQ ID NO: 8044 - DNA, 20 bp, synthetic construct
  misc_feature 1..20: note = Description of Artificial Sequence: Synthetic oligonucleotide
  misc_feature 1..20: note = Target: ANGPTL3; (-) strand; PAM type: NRG; PAM sequence: AAG
  source 1..20: mol_type = other DNA
atggatataaagaagtgagg

SEQ ID NO: 8045 - DNA, 20 bp, synthetic construct
  misc_feature 1..20: note = Description of Artificial Sequence: Synthetic oligonucleotide
  misc_feature 1..20: note = Target: ANGPTL3; (-) strand; PAM type: NRG; PAM sequence: AGG
  source 1..20: mol_type = other DNA
ttaatggatataaagaagtg

SEQ ID NO: 8046 - DNA, 20 bp, synthetic construct
  misc_feature 1..20: note = Description of Artificial Sequence: Synthetic oligonucleotide
  misc_feature 1..20: note = Target: ANGPTL3; (-) strand; PAM type: NRG; PAM sequence: GAG
  source 1..20: mol_type = other DNA
attaatggatataaagaagt

SEQ ID NO: 8047 - DNA, 20 bp, synthetic construct
  misc_feature 1..20: note = Description of Artificial Sequence: Synthetic oligonucleotide
  misc_feature 1..20: note = Target: ANGPTL3; (-) strand; PAM type: NRG; PAM sequence: AAG
  source 1..20: mol_type = other DNA
tcatattaatggatataaag

SEQ ID NO: 8048 - DNA, 20 bp, synthetic construct
  misc_feature 1..20: note = Description of Artificial Sequence: Synthetic oligonucleotide
  misc_feature 1..20: note = Target: ANGPTL3; (-) strand; PAM type: NRG; PAM sequence: AAG
  source 1..20: mol_type = other DNA
tggtcatattaatggatata

SEQ ID NO: 8049 - DNA, 20 bp, synthetic construct
  misc_feature 1..20: note = Description of Artificial Sequence: Synthetic oligonucleotide
  misc_feature 1..20: note = Target: ANGPTL3; (-) strand; PAM type: NRG; PAM sequence: TGG
  source 1..20: mol_type = other DNA
gaacatgctggtcatattaa

SEQ ID NO: 8050 - DNA, 20 bp, synthetic construct
  misc_feature 1..20: note = Description of Artificial Sequence: Synthetic oligonucleotide
  misc_feature 1..20: note = Target: ANGPTL3; (-) strand; PAM type: NRG; PAM sequence: TGG
  source 1..20: mol_type = other DNA
ttctgtgactgggaacatgc

SEQ ID NO: 8051 - DNA, 20 bp, synthetic construct
  misc_feature 1..20: note = Description of Artificial Sequence: Synthetic oligonucleotide
  misc_feature 1..20: note = Target: ANGPTL3; (-) strand; PAM type: NRG; PAM sequence: GGG
  source 1..20: mol_type = other DNA
ggttccaggcttctgtgact

SEQ ID NO: 8052 - DNA, 20 bp, synthetic construct
  misc_feature 1..20: note = Description of Artificial Sequence: Synthetic oligonucleotide
  misc_feature 1..20: note = Target: ANGPTL3; (-) strand; PAM type: NRG; PAM sequence: TGG
  source 1..20: mol_type = other DNA
gggttccaggcttctgtgac

SEQ ID NO: 8053 - DNA, 20 bp, synthetic construct
  misc_feature 1..20: note = Description of Artificial Sequence: Synthetic oligonucleotide
  misc_feature 1..20: note = Target: ANGPTL3; (-) strand; PAM type: NRG; PAM sequence: AGG
  source 1..20: mol_type = other DNA
agagatgtcttccgggttcc

SEQ ID NO: 8054 - DNA, 20 bp, synthetic construct
  misc_feature 1..20: note = Description of Artificial Sequence: Synthetic oligonucleotide
  misc_feature 1..20: note = Target: ANGPTL3; (-) strand; PAM type: NRG; PAM sequence: CAG
  source 1..20: mol_type = other DNA
cagagatgtcttccgggttc

SEQ ID NO: 8055 - DNA, 20 bp, synthetic construct
  misc_feature 1..20: note = Description of Artificial Sequence: Synthetic oligonucleotide
  misc_feature 1..20: note = Target: ANGPTL3; (-) strand; PAM type: NRG; PAM sequence: GGG
  source 1..20: mol_type = other DNA
aaaagccagagatgtcttcc

SEQ ID NO: 8056 - DNA, 20 bp, synthetic construct
  misc_feature 1..20: note = Description of Artificial Sequence: Synthetic oligonucleotide
  misc_feature 1..20: note = Target: ANGPTL3; (-) strand; PAM type: NRG; PAM sequence: CGG
  source 1..20: mol_type = other DNA
gaaaagccagagatgtcttc

SEQ ID NO: 8057 - DNA, 20 bp, synthetic construct
  misc_feature 1..20: note = Description of Artificial Sequence: Synthetic oligonucleotide
  misc_feature 1..20: note = Target: ANGPTL3; (-) strand; PAM type: NRG; PAM sequence: GAG
  source 1..20: mol_type = other DNA
caaagttgagtgaaaagcca

SEQ ID NO: 8058 - DNA, 20 bp, synthetic construct
  misc_feature 1..20: note = Description of Artificial Sequence: Synthetic oligonucleotide
  misc_feature 1..20: note = Target: ANGPTL3; (-) strand; PAM type: NRG; PAM sequence: CAG
  source 1..20: mol_type = other DNA
tacaaagttgagtgaaaagc

SEQ ID NO: 8059 - DNA, 20 bp, synthetic construct
  misc_feature 1..20: note = Description of Artificial Sequence: Synthetic oligonucleotide
  misc_feature 1..20: note = Target: ANGPTL3; (-) strand; PAM type: NRG; PAM sequence: AAG
  source 1..20: mol_type = other DNA
agtttacaaagttgagtgaa

SEQ ID NO: 8060 - DNA, 20 bp, synthetic construct
  misc_feature 1..20: note = Description of Artificial Sequence: Synthetic oligonucleotide
  misc_feature 1..20: note = Target: ANGPTL3; (-) strand; PAM type: NRG; PAM sequence: GAG
  source 1..20: mol_type = other DNA
aagaggtagtttacaaagtt

SEQ ID NO: 8061 - DNA, 20 bp, synthetic construct
  misc_feature 1..20: note = Description of Artificial Sequence: Synthetic oligonucleotide
  misc_feature 1..20: note = Target: ANGPTL3; (-) strand; PAM type: NRG; PAM sequence: AAG
  source 1..20: mol_type = other DNA
tacaaaagaggtagtttaca

SEQ ID NO: 8062 - DNA, 20 bp, synthetic construct
  misc_feature 1..20: note = Description of Artificial Sequence: Synthetic oligonucleotide
  misc_feature 1..20: note = Target: ANGPTL3; (-) strand; PAM type: NRG; PAM sequence: TAG
  source 1..20: mol_type = other DNA
ggcttatgatacaaaagagg

SEQ ID NO: 8063 - DNA, 20 bp, synthetic construct
  misc_feature 1..20: note = Description of Artificial Sequence: Synthetic oligonucleotide
  misc_feature 1..20: note = Target: ANGPTL3; (-) strand; PAM type: NRG; PAM sequence: AGG
  source 1..20: mol_type = other DNA
ggtggcttatgatacaaaag

SEQ ID NO: 8064 - DNA, 20 bp, synthetic construct
  misc_feature 1..20: note = Description of Artificial Sequence: Synthetic oligonucleotide
  misc_feature 1..20: note = Target: ANGPTL3; (-) strand; PAM type: NRG; PAM sequence: GAG
  source 1..20: mol_type = other DNA
tggtggcttatgatacaaaa

SEQ ID NO: 8065 - DNA, 20 bp, synthetic construct
  misc_feature 1..20: note = Description of Artificial Sequence: Synthetic oligonucleotide
  misc_feature 1..20: note = Target: ANGPTL3; (-) strand; PAM type: NRG; PAM sequence: AAG
  source 1..20: mol_type = other DNA
cttggtggcttatgatacaa

SEQ ID NO: 8066 - DNA, 20 bp, synthetic construct
  misc_feature 1..20: note = Description of Artificial Sequence: Synthetic oligonucleotide
  misc_feature 1..20: note = Target: ANGPTL3; (-) strand; PAM type: NRG; PAM sequence: TGG
  source 1..20: mol_type = other DNA
gaagattgtattgaacttgg

SEQ ID NO: 8067 - DNA, 20 bp, synthetic construct
  misc_feature 1..20: note = Description of Artificial Sequence: Synthetic oligonucleotide
  misc_feature 1..20: note = Target: ANGPTL3; (-) strand; PAM type: NRG; PAM sequence: TGG
  source 1..20: mol_type = other DNA
agagaagattgtattgaact

SEQ ID NO: 8068 - DNA, 20 bp, synthetic construct
  misc_feature 1..20: note = Description of Artificial Sequence: Synthetic oligonucleotide
  misc_feature 1..20: note = Target: ANGPTL3; (-) strand; PAM type: NRG; PAM sequence: AAG
  source 1..20: mol_type = other DNA
attaagagacgtttcaagag

SEQ ID NO: 8069 - DNA, 20 bp, synthetic construct
  misc_feature 1..20: note = Description of Artificial Sequence: Synthetic oligonucleotide
  misc_feature 1..20: note = Target: ANGPTL3; (-) strand; PAM type: NRG; PAM sequence: GAG
  source 1..20: mol_type = other DNA
aagattaagagacgtttcaa

SEQ ID NO: 8070 - DNA, 20 bp, synthetic construct
  misc_feature 1..20: note = Description of Artificial Sequence: Synthetic oligonucleotide
  misc_feature 1..20: note = Target: ANGPTL3; (-) strand; PAM type: NRG; PAM sequence: AAG
  source 1..20: mol_type = other DNA
ataagattaagagacgtttc

SEQ ID NO: 8071 - DNA, 20 bp, synthetic construct
  misc_feature 1..20: note = Description of Artificial Sequence: Synthetic oligonucleotide
  misc_feature 1..20: note = Target: ANGPTL3; (-) strand; PAM type: NRG; PAM sequence: GAG
  source 1..20: mol_type = other DNA
aagaaagcttataagattaa

SEQ ID NO: 8072 - DNA, 20 bp, synthetic construct
  misc_feature 1..20: note = Description of Artificial Sequence: Synthetic oligonucleotide
  misc_feature 1..20: note = Target: ANGPTL3; (-) strand; PAM type: NRG; PAM sequence: AAG
  source 1..20: mol_type = other DNA
ggaagaaagcttataagatt

SEQ ID NO: 8073 - DNA, 20 bp, synthetic construct
  misc_feature 1..20: note = Description of Artificial Sequence: Synthetic oligonucleotide
  misc_feature 1..20: note = Target: ANGPTL3; (-) strand; PAM type: NRG; PAM sequence: AAG
  source 1..20: mol_type = other DNA
ctttggggaagaaagcttat

SEQ ID NO: 8074 - DNA, 20 bp, synthetic construct
  misc_feature 1..20: note = Description of Artificial Sequence: Synthetic oligonucleotide
  misc_feature 1..20: note = Target: ANGPTL3; (-) strand; PAM type: NRG; PAM sequence: AAG
  source 1..20: mol_type = other DNA
aagacagtctttggggaaga

SEQ ID NO: 8075 - DNA, 20 bp, synthetic construct
  misc_feature 1..20: note = Description of Artificial Sequence: Synthetic oligonucleotide
  misc_feature 1..20: note = Target: ANGPTL3; (-) strand; PAM type: NRG; PAM sequence: AAG
  source 1..20: mol_type = other DNA
gttaaagacagtctttgggg

SEQ ID NO: 8076 - DNA, 20 bp, synthetic construct
  misc_feature 1..20: note = Description of Artificial Sequence: Synthetic oligonucleotide
  misc_feature 1..20: note = Target: ANGPTL3; (-) strand; PAM type: NRG; PAM sequence: GGG
  source 1..20: mol_type = other DNA
gaagttaaagacagtctttg

SEQ ID NO: 8077 - DNA, 20 bp, synthetic construct
  misc_feature 1..20: note = Description of Artificial Sequence: Synthetic oligonucleotide
  misc_feature 1..20: note = Target: ANGPTL3; (-) strand; PAM type: NRG; PAM sequence: GGG
  source 1..20: mol_type = other DNA
tgaagttaaagacagtcttt

SEQ ID NO: 8078 - DNA, 20 bp, synthetic construct
  misc_feature 1..20: note = Description of Artificial Sequence: Synthetic oligonucleotide
  misc_feature 1..20: note = Target: ANGPTL3; (-) strand; PAM type: NRG; PAM sequence: TGG
  source 1..20: mol_type = other DNA
ctgaagttaaagacagtctt

SEQ ID NO: 8079 - DNA, 20 bp, synthetic construct
  misc_feature 1..20: note = Description of Artificial Sequence: Synthetic oligonucleotide
  misc_feature 1..20: note = Target: ANGPTL3; (-) strand; PAM type: NRG; PAM sequence: CAG
  source 1..20: mol_type = other DNA
tctagcactgaagttaaaga

SEQ ID NO: 8080 - DNA, 20 bp, synthetic construct
  misc_feature 1..20: note = Description of Artificial Sequence: Synthetic oligonucleotide
  misc_feature 1..20: note = Target: ANGPTL3; (-) strand; PAM type: NRG; PAM sequence: AAG
  source 1..20: mol_type = other DNA
ataatctagcactgaagtta

SEQ ID NO: 8081 - DNA, 20 bp, synthetic construct
  misc_feature 1..20: note = Description of Artificial Sequence: Synthetic oligonucleotide
  misc_feature 1..20: note = Target: ANGPTL3; (-) strand; PAM type: NRG; PAM sequence: AAG
  source 1..20: mol_type = other DNA
acttatataatctagcactg

SEQ ID NO: 8082 - DNA, 20 bp, synthetic construct
  misc_feature 1..20: note = Description of Artificial Sequence: Synthetic oligonucleotide
  misc_feature 1..20: note = Target: ANGPTL3; (-) strand; PAM type: NRG; PAM sequence: TAG
  source 1..20: mol_type = other DNA
aagagactacttatataatc

SEQ ID NO: 8083 - DNA, 20 bp, synthetic construct
  misc_feature 1..20: note = Description of Artificial Sequence: Synthetic oligonucleotide
  misc_feature 1..20: note = Target: ANGPTL3; (-) strand; PAM type: NRG; PAM sequence: GAG
  source 1..20: mol_type = other DNA
gtaaaattaggaggaaagaa

SEQ ID NO: 8084 - DNA, 20 bp, synthetic construct
  misc_feature 1..20: note = Description of Artificial Sequence: Synthetic oligonucleotide
  misc_feature 1..20: note = Target: ANGPTL3; (-) strand; PAM type: NRG; PAM sequence: AAG
  source 1..20: mol_type = other DNA
acgtaaaattaggaggaaag

SEQ ID NO: 8085 - DNA, 20 bp, synthetic construct
  misc_feature 1..20: note = Description of Artificial Sequence: Synthetic oligonucleotide
  misc_feature 1..20: note = Target: ANGPTL3; (-) strand; PAM type: NRG; PAM sequence: AAG
  source 1..20: mol_type = other DNA
gggacgtaaaattaggagga

SEQ ID NO: 8086 - DNA, 20 bp, synthetic construct
  misc_feature 1..20: note = Description of Artificial Sequence: Synthetic oligonucleotide
  misc_feature 1..20: note = Target: ANGPTL3; (-) strand; PAM type: NRG; PAM sequence: AGG
  source 1..20: mol_type = other DNA
gagagggacgtaaaattagg

SEQ ID NO: 8087 - DNA, 20 bp, synthetic construct
  misc_feature 1..20: note = Description of Artificial Sequence: Synthetic oligonucleotide
  misc_feature 1..20: note = Target: ANGPTL3; (-) strand; PAM type: NRG; PAM sequence: GAG
  source 1..20: mol_type = other DNA
ggagagggacgtaaaattag

SEQ ID NO: 8088 - DNA, 20 bp, synthetic construct
  misc_feature 1..20: note = Description of Artificial Sequence: Synthetic oligonucleotide
  misc_feature 1..20: note = Target: ANGPTL3; (-) strand; PAM type: NRG; PAM sequence: AGG
  source 1..20: mol_type = other DNA
agggagagggacgtaaaatt

SEQ ID NO: 8089 - DNA, 20 bp, synthetic construct
  misc_feature 1..20: note = Description of Artificial Sequence: Synthetic oligonucleotide
  misc_feature 1..20: note = Target: ANGPTL3; (-) strand; PAM type: NRG; PAM sequence: TAG
  source 1..20: mol_type = other DNA
cagggagagggacgtaaaat

SEQ ID NO: 8090 - DNA, 20 bp, synthetic construct
  misc_feature 1..20: note = Description of Artificial Sequence: Synthetic oligonucleotide
  misc_feature 1..20: note = Target: ANGPTL3; (-) strand; PAM type: NRG; PAM sequence: GGG
  source 1..20: mol_type = other DNA
tcggaagattgacagggaga

SEQ ID NO: 8091 - DNA, 20 bp, synthetic construct
  misc_feature 1..20: note = Description of Artificial Sequence: Synthetic oligonucleotide
  misc_feature 1..20: note = Target: ANGPTL3; (-) strand; PAM type: NRG; PAM sequence: AGG
  source 1..20: mol_type = other DNA
ttcggaagattgacagggag

SEQ ID NO: 8092 - DNA, 20 bp, synthetic construct
  misc_feature 1..20: note = Description of Artificial Sequence: Synthetic oligonucleotide
  misc_feature 1..20: note = Target: ANGPTL3; (-) strand; PAM type: NRG; PAM sequence: GAG
  source 1..20: mol_type = other DNA
tttcggaagattgacaggga

SEQ ID NO: 8093 - DNA, 20 bp, synthetic construct
  misc_feature 1..20: note = Description of Artificial Sequence: Synthetic oligonucleotide
  misc_feature 1..20: note = Target: ANGPTL3; (-) strand; PAM type: NRG; PAM sequence: GAG
  source 1..20: mol_type = other DNA
cttttcggaagattgacagg

SEQ ID NO: 8094 - DNA, 20 bp, synthetic construct
  misc_feature 1..20: note = Description of Artificial Sequence: Synthetic oligonucleotide
  misc_feature 1..20: note = Target: ANGPTL3; (-) strand; PAM type: NRG; PAM sequence: GGG
  source 1..20: mol_type = other DNA
tccttttcggaagattgaca

SEQ ID NO: 8095 - DNA, 20 bp, synthetic construct
  misc_feature 1..20: note = Description of Artificial Sequence: Synthetic oligonucleotide
  misc_feature 1..20: note = Target: ANGPTL3; (-) strand; PAM type: NRG; PAM sequence: AGG
  source 1..20: mol_type = other DNA
ttccttttcggaagattgac

SEQ ID NO: 8096 - DNA, 20 bp, synthetic construct
  misc_feature 1..20: note = Description of Artificial Sequence: Synthetic oligonucleotide
  misc_feature 1..20: note = Target: ANGPTL3; (-) strand; PAM type: NRG; PAM sequence: CAG
  source 1..20: mol_type = other DNA
attccttttcggaagattga

SEQ ID NO: 8097 - DNA, 20 bp, synthetic construct
  misc_feature 1..20: note = Description of Artificial Sequence: Synthetic oligonucleotide
  misc_feature 1..20: note = Target: ANGPTL3; (-) strand; PAM type: NRG; PAM sequence: AAG
  source 1..20: mol_type = other DNA
cattacaaattccttttcgg

SEQ ID NO: 8098 - DNA, 20 bp, synthetic construct
  misc_feature 1..20: note = Description of Artificial Sequence: Synthetic oligonucleotide
  misc_feature 1..20: note = Target: ANGPTL3; (-) strand; PAM type: NRG; PAM sequence: CGG
  source 1..20: mol_type = other DNA
agccattacaaattcctttt

SEQ ID NO: 8099 - DNA, 20 bp, synthetic construct
  misc_feature 1..20: note = Description of Artificial Sequence: Synthetic oligonucleotide
  misc_feature 1..20: note = Target: ANGPTL3; (-) strand; PAM type: NRG; PAM sequence: CAG
  source 1..20: mol_type = other DNA
acacaggtccaggcagtatg

SEQ ID NO: 8100 - DNA, 20 bp, synthetic construct
  misc_feature 1..20: note = Description of Artificial Sequence: Synthetic oligonucleotide
  misc_feature 1..20: note = Target: ANGPTL3; (-) strand; PAM type: NRG; PAM sequence: CAG
  source 1..20: mol_type = other DNA
ttgaaagacacaggtccagg

SEQ ID NO: 8101 - DNA, 20 bp, synthetic construct
  misc_feature 1..20: note = Description of Artificial Sequence: Synthetic oligonucleotide
  misc_feature 1..20: note = Target: ANGPTL3; (-) strand; PAM type: NRG; PAM sequence: AGG
  source 1..20: mol_type = other DNA
agcttgaaagacacaggtcc

SEQ ID NO: 8102 - DNA, 20 bp, synthetic construct
  misc_feature 1..20: note = Description of Artificial Sequence: Synthetic oligonucleotide
  misc_feature 1..20: note = Target: ANGPTL3; (-) strand; PAM type: NRG; PAM sequence: CAG
  source 1..20: mol_type = other DNA
gagcttgaaagacacaggtc

SEQ ID NO: 8103 - DNA, 20 bp, synthetic construct
  misc_feature 1..20: note = Description of Artificial Sequence: Synthetic oligonucleotide
  misc_feature 1..20: note = Target: ANGPTL3; (-) strand; PAM type: NRG; PAM sequence: AGG
  source 1..20: mol_type = other DNA
tagatgagcttgaaagacac

SEQ ID NO: 8104 - DNA, 20 bp, synthetic construct
  misc_feature 1..20: note = Description of Artificial Sequence: Synthetic oligonucleotide
  misc_feature 1..20: note = Target: ANGPTL3; (-) strand; PAM type: NRG; PAM sequence: CAG
  source 1..20: mol_type = other DNA
gtagatgagcttgaaagaca

SEQ ID NO: 8105 - DNA, 20 bp, synthetic construct
  misc_feature 1..20: note = Description of Artificial Sequence: Synthetic oligonucleotide
  misc_feature 1..20: note = Target: ANGPTL3; (-) strand; PAM type: NRG; PAM sequence: AAG
  source 1..20: mol_type = other DNA
tcttcagtagatgagcttga

SEQ ID NO: 8106 - DNA, 20 bp, synthetic construct
  misc_feature 1..20: note = Description of Artificial Sequence: Synthetic oligonucleotide
  misc_feature 1..20: note = Target: ANGPTL3; (-) strand; PAM type: NRG; PAM sequence: GAG
  source 1..20: mol_type = other DNA
gttacacttcttcagtagat

SEQ ID NO: 8107 - DNA, 20 bp, synthetic construct
  misc_feature 1..20: note = Description of Artificial Sequence: Synthetic oligonucleotide
  misc_feature 1..20: note = Target: ANGPTL3; (-) strand; PAM type: NRG; PAM sequence: TAG
  source 1..20: mol_type = other DNA
ctgctgttacacttcttcag

SEQ ID NO: 8108 - DNA, 20 bp, synthetic construct
  misc_feature 1..20: note = Description of Artificial Sequence: Synthetic oligonucleotide
  misc_feature 1..20: note = Target: ANGPTL3; (-) strand; PAM type: NRG; PAM sequence: CAG
  source 1..20: mol_type = other DNA
cctctgctgttacacttctt

SEQ ID NO: 8109 - DNA, 20 bp, synthetic construct
  misc_feature 1..20: note = Description of Artificial Sequence: Synthetic oligonucleotide
  misc_feature 1..20: note = Target: ANGPTL3; (-) strand; PAM type: NRG; PAM sequence: AGG
  source 1..20: mol_type = other DNA
ctgtaactccagacaataaa

SEQ ID NO: 8110 - DNA, 20 bp, synthetic construct
  misc_feature 1..20: note = Description of Artificial Sequence: Synthetic oligonucleotide
  misc_feature 1..20: note = Target: ANGPTL3; (-) strand; PAM type: NRG; PAM sequence: AAG
  source 1..20: mol_type = other DNA
cctgtaactccagacaataa

SEQ ID NO: 8111 - DNA, 20 bp, synthetic construct
  misc_feature 1..20: note = Description of Artificial Sequence: Synthetic oligonucleotide
  misc_feature 1..20: note = Target: ANGPTL3; (-) strand; PAM type: NRG; PAM sequence: CAG
  source 1..20: mol_type = other DNA
gttattttatcctgtaactc

SEQ ID NO: 8112 - DNA, 20 bp, synthetic construct
  misc_feature 1..20: note = Description of Artificial Sequence: Synthetic oligonucleotide
  misc_feature 1..20: note = Target: ANGPTL3; (-) strand; PAM type: NRG; PAM sequence: AAG
  source 1..20: mol_type = other DNA
aagaaatttgtgcatatagt

SEQ ID NO: 8113 - DNA, 20 bp, synthetic construct
  misc_feature 1..20: note = Description of Artificial Sequence: Synthetic oligonucleotide
  misc_feature 1..20: note = Target: ANGPTL3; (-) strand; PAM type: NRG; PAM sequence: TAG
  source 1..20: mol_type = other DNA
ctgaaagaaatttgtgcata

SEQ ID NO: 8114 - DNA, 20 bp, synthetic construct
  misc_feature 1..20: note = Description of Artificial Sequence: Synthetic oligonucleotide
  misc_feature 1..20: note = Target: ANGPTL3; (-) strand; PAM type: NRG; PAM sequence: AAG
  source 1..20: mol_type = other DNA
agatcccaataagattctga

SEQ ID NO: 8115 - DNA, 20 bp, synthetic construct
  misc_feature 1..20: note = Description of Artificial Sequence: Synthetic oligonucleotide
  misc_feature 1..20: note = Target: ANGPTL3; (-) strand; PAM type: NRG; PAM sequence: AAG
  source 1..20: mol_type = other DNA
atttaagctaagatcccaat

SEQ ID NO: 8116 - DNA, 20 bp, synthetic construct
  misc_feature 1..20: note = Description of Artificial Sequence: Synthetic oligonucleotide
  misc_feature 1..20: note = Target: ANGPTL3; (-) strand; PAM type: NRG; PAM sequence: AAG
  source 1..20: mol_type = other DNA
aaaattctaagatttaagct

SEQ ID NO: 8117 - DNA, 20 bp, synthetic construct
  misc_feature 1..20: note = Description of Artificial Sequence: Synthetic oligonucleotide
  misc_feature 1..20: note = Target: ANGPTL3; (-) strand; PAM type: NRG; PAM sequence: AAG
  source 1..20: mol_type = other DNA
aaagtaaaattctaagattt

SEQ ID NO: 8118 - DNA, 20 bp, synthetic construct
  misc_feature 1..20: note = Description of Artificial Sequence: Synthetic oligonucleotide
  misc_feature 1..20: note = Target: ANGPTL3; (-) strand; PAM type: NRG; PAM sequence: AAG
  source 1..20: mol_type = other DNA
caattttaaagtaaaattct

SEQ ID NO: 8119 - DNA, 20 bp, synthetic construct
  misc_feature 1..20: note = Description of Artificial Sequence: Synthetic oligonucleotide
  misc_feature 1..20: note = Target: ANGPTL3; (-) strand; PAM type: NRG; PAM sequence: AAG
  source 1..20: mol_type = other DNA
acaattcatatgcaatttta

SEQ ID NO: 8120 - DNA, 20 bp, synthetic construct
  misc_feature 1..20: note = Description of Artificial Sequence: Synthetic oligonucleotide
  misc_feature 1..20: note = Target: ANGPTL3; (-) strand; PAM type: NRG; PAM sequence: AAG
  source 1..20: mol_type = other DNA
ggcatgaagatagatttata

SEQ ID NO: 8121 - DNA, 20 bp, synthetic construct
  misc_feature 1..20: note = Description of Artificial Sequence: Synthetic oligonucleotide
  misc_feature 1..20: note = Target: ANGPTL3; (-) strand; PAM type: NRG; PAM sequence: TAG
  source 1..20: mol_type = other DNA
agccactgcaggcatgaaga

SEQ ID NO: 8122 - DNA, 20 bp, synthetic construct
  misc_feature 1..20: note = Description of Artificial Sequence: Synthetic oligonucleotide
  misc_feature 1..20: note = Target: ANGPTL3; (-) strand; PAM type: NRG; PAM sequence: AAG
  source 1..20: mol_type = other DNA
tgtgagccactgcaggcatg

SEQ ID NO: 8123 - DNA, 20 bp, synthetic construct
  misc_feature 1..20: note = Description of Artificial Sequence: Synthetic oligonucleotide
  misc_feature 1..20: note = Target: ANGPTL3; (-) strand; PAM type: NRG; PAM sequence: AGG
  source 1..20: mol_type = other DNA
ttacaggtgtgagccactgc

SEQ ID NO: 8124 - DNA, 20 bp, synthetic construct
  misc_feature 1..20: note = Description of Artificial Sequence: Synthetic oligonucleotide
  misc_feature 1..20: note = Target: ANGPTL3; (-) strand; PAM type: NRG; PAM sequence: CAG
  source 1..20: mol_type = other DNA
attacaggtgtgagccactg

SEQ ID NO: 8125 - DNA, 20 bp, synthetic construct
  misc_feature 1..20: note = Description of Artificial Sequence: Synthetic oligonucleotide
  misc_feature 1..20: note = Target: ANGPTL3; (-) strand; PAM type: NRG; PAM sequence: GAG
  source 1..20: mol_type = other DNA
aatacttggattacaggtgt

SEQ ID NO: 8126 - DNA, 20 bp, synthetic construct
  misc_feature 1..20: note = Description of Artificial Sequence: Synthetic oligonucleotide
  misc_feature 1..20: note = Target: ANGPTL3; (-) strand; PAM type: NRG; PAM sequence: AGG
  source 1..20: mol_type = other DNA
tcccaaaatacttggattac

SEQ ID NO: 8127 - DNA, 20 bp, synthetic construct
  misc_feature 1..20: note = Description of Artificial Sequence: Synthetic oligonucleotide
  misc_feature 1..20: note = Target: ANGPTL3; (-) strand; PAM type: NRG; PAM sequence: CAG
  source 1..20: mol_type = other DNA
ctcccaaaatacttggatta

SEQ ID NO: 8128 - DNA, 20 bp, synthetic construct
  misc_feature 1..20: note = Description of Artificial Sequence: Synthetic oligonucleotide
  misc_feature 1..20: note = Target: ANGPTL3; (-) strand; PAM type: NRG; PAM sequence: TGG
  source 1..20: mol_type = other DNA
ccccggcctcccaaaatact

SEQ ID NO: 8129 - DNA, 20 bp, synthetic construct
  misc_feature 1..20: note = Description of Artificial Sequence: Synthetic oligonucleotide
  misc_feature 1..20: note = Target: ANGPTL3; (-) strand; PAM type: NRG; PAM sequence: CGG
  source 1..20: mol_type = other DNA
ttcaagcagtactcccgccc

SEQ ID NO: 8130 - DNA, 20 bp, synthetic construct
  misc_feature 1..20: note = Description of Artificial Sequence: Synthetic oligonucleotide
  misc_feature 1..20: note = Target: ANGPTL3; (-) strand; PAM type: NRG; PAM sequence: CAG
  source 1..20: mol_type = other DNA
cttggactcctgggttcaag

SEQ ID NO: 8131 - DNA, 20 bp, synthetic construct
  misc_feature 1..20: note = Description of Artificial Sequence: Synthetic oligonucleotide
  misc_feature 1..20: note = Target: ANGPTL3; (-) strand; PAM type: NRG; PAM sequence: AAG
  source 1..20: mol_type = other DNA
gatcttggactcctgggttc

SEQ ID NO: 8132 - DNA, 20 bp, synthetic construct
  misc_feature 1..20: note = Description of Artificial Sequence: Synthetic oligonucleotide
  misc_feature 1..20: note = Target: ANGPTL3; (-) strand; PAM type: NRG; PAM sequence: GGG
  source 1..20: mol_type = other DNA
caggctgatcttggactcct

SEQ ID NO: 8133 - DNA, 20 bp, synthetic construct
  misc_feature 1..20: note = Description of Artificial Sequence: Synthetic oligonucleotide
  misc_feature 1..20: note = Target: ANGPTL3; (-) strand; PAM type: NRG; PAM sequence: TGG
  source 1..20: mol_type = other DNA
acaggctgatcttggactcc

SEQ ID NO: 8134 - DNA, 20 bp, synthetic construct
  misc_feature 1..20: note = Description of Artificial Sequence: Synthetic oligonucleotide
  misc_feature 1..20: note = Target: ANGPTL3; (-) strand; PAM type: NRG; PAM sequence: TGG
  source 1..20: mol_type = other DNA
cgtgttgcacaggctgatct

SEQ ID NO: 8135 - DNA, 20 bp, synthetic construct
  misc_feature 1..20: note = Description of Artificial Sequence: Synthetic oligonucleotide
  misc_feature 1..20: note = Target: ANGPTL3; (-) strand; PAM type: NRG; PAM sequence: AGG
  source 1..20: mol_type = other DNA
ggagttttgccgtgttgcac

SEQ ID NO: 8136 - DNA, 20 bp, synthetic construct
  misc_feature 1..20: note = Description of Artificial Sequence: Synthetic oligonucleotide
  misc_feature 1..20: note = Target: ANGPTL3; (-) strand; PAM type: NRG; PAM sequence: CAG
  source 1..20: mol_type = other DNA
tggagttttgccgtgttgca

SEQ ID NO: 8137 - DNA, 20 bp, synthetic construct
  misc_feature 1..20: note = Description of Artificial Sequence: Synthetic oligonucleotide
  misc_feature 1..20: note = Target: ANGPTL3; (-) strand; PAM type: NRG; PAM sequence: GAG
  source 1..20: mol_type = other DNA
ttgtattttttgtagaggtg

SEQ ID NO: 8138 - DNA, 20 bp, synthetic construct
  misc_feature 1..20: note = Description of Artificial Sequence: Synthetic oligonucleotide
  misc_feature 1..20: note = Target: ANGPTL3; (-) strand; PAM type: NRG; PAM sequence: TGG
  source 1..20: mol_type = other DNA
ttttgtattttttgtagagg

SEQ ID NO: 8139 - DNA, 20 bp, synthetic construct
  misc_feature 1..20: note = Description of Artificial Sequence: Synthetic oligonucleotide
  misc_feature 1..20: note = Target: ANGPTL3; (-) strand; PAM type: NRG; PAM sequence: AGG
  source 1..20: mol_type = other DNA
aatttttgtattttttgtag

SEQ ID NO: 8140 - DNA, 20 bp, synthetic construct
  misc_feature 1..20: note = Description of Artificial Sequence: Synthetic oligonucleotide
  misc_feature 1..20: note = Target: ANGPTL3; (-) strand; PAM type: NRG; PAM sequence: GAG
  source 1..20: mol_type = other DNA
taatttttgtattttttgta

SEQ ID NO: 8141 - DNA, 20 bp, synthetic construct
  misc_feature 1..20: note = Description of Artificial Sequence: Synthetic oligonucleotide
  misc_feature 1..20: note = Target: ANGPTL3; (-) strand; PAM type: NRG; PAM sequence: TAG
  source 1..20: mol_type = other DNA
gctaatttttgtattttttg

SEQ ID NO: 8142 - DNA, 20 bp, synthetic construct
  misc_feature 1..20: note = Description of Artificial Sequence: Synthetic oligonucleotide
  misc_feature 1..20: note = Target: ANGPTL3; (-) strand; PAM type: NRG; PAM sequence: CAG
  source 1..20: mol_type = other DNA
caggcacctgccaccacacc

SEQ ID NO: 8143 - DNA, 20 bp, synthetic construct
  misc_feature 1..20: note = Description of Artificial Sequence: Synthetic oligonucleotide
  misc_feature 1..20: note = Target: ANGPTL3; (-) strand; PAM type: NRG; PAM sequence: AGG
  source 1..20: mol_type = other DNA
tcccaagtagttgggattac

SEQ ID NO: 8144 - DNA, 20 bp, synthetic construct
  misc_feature 1..20: note = Description of Artificial Sequence: Synthetic oligonucleotide
  misc_feature 1..20: note = Target: ANGPTL3; (-) strand; PAM type: NRG; PAM sequence: CAG
  source 1..20: mol_type = other DNA
ctcccaagtagttgggatta

SEQ ID NO: 8145 - DNA, 20 bp, synthetic construct
  misc_feature 1..20: note = Description of Artificial Sequence: Synthetic oligonucleotide
  misc_feature 1..20: note = Target: ANGPTL3; (-) strand; PAM type: NRG; PAM sequence: GGG
  source 1..20: mol_type = other DNA
cctcagcctcccaagtagtt

SEQ ID NO: 8146 - DNA, 20 bp, synthetic construct
  misc_feature 1..20: note = Description of Artificial Sequence: Synthetic oligonucleotide
  misc_feature 1..20: note = Target: ANGPTL3; (-) strand; PAM type: NRG; PAM sequence: TGG
  source 1..20: mol_type = other DNA
gcctcagcctcccaagtagt

SEQ ID NO: 8147 - DNA, 20 bp, synthetic construct
  misc_feature 1..20: note = Description of Artificial Sequence: Synthetic oligonucleotide
  misc_feature 1..20: note = Target: ANGPTL3; (-) strand; PAM type: NRG; PAM sequence: TAG
  source 1..20: mol_type = other DNA
tcctgcctcagcctcccaag

SEQ ID NO: 8148 - DNA, 20 bp, synthetic construct
  misc_feature 1..20: note = Description of Artificial Sequence: Synthetic oligonucleotide
  misc_feature 1..20: note = Target: ANGPTL3; (-) strand; PAM type: NRG; PAM sequence: AAG
  source 1..20: mol_type = other DNA
ttctcctgcctcagcctccc

SEQ ID NO: 8149 - DNA, 20 bp, synthetic construct
  misc_feature 1..20: note = Description of Artificial Sequence: Synthetic oligonucleotide
  misc_feature 1..20: note = Target: ANGPTL3; (-) strand; PAM type: NRG; PAM sequence: CAG
  source 1..20: mol_type = other DNA
ctccagcgattctcctgcct

SEQ ID NO: 8150 - DNA, 20 bp, synthetic construct
  misc_feature 1..20: note = Description of Artificial Sequence: Synthetic oligonucleotide
  misc_feature 1..20: note = Target: ANGPTL3; (-) strand; PAM type: NRG; PAM sequence: CAG
  source 1..20: mol_type = other DNA
aggcttgacttcccaggctc

SEQ ID NO: 8151 - DNA, 20 bp, synthetic construct
  misc_feature 1..20: note = Description of Artificial Sequence: Synthetic oligonucleotide
  misc_feature 1..20: note = Target: ANGPTL3; (-) strand; PAM type: NRG; PAM sequence: AGG
  source 1..20: mol_type = other DNA
cgctgcaggcttgacttccc

SEQ ID NO: 8152 - DNA, 20 bp, synthetic construct
  misc_feature 1..20: note = Description of Artificial Sequence: Synthetic oligonucleotide
  misc_feature 1..20: note = Target: ANGPTL3; (-) strand; PAM type: NRG; PAM sequence: CAG
  source 1..20: mol_type = other DNA
tcgctgcaggcttgacttcc

SEQ ID NO: 8153 - DNA, 20 bp, synthetic construct
  misc_feature 1..20: note = Description of Artificial Sequence: Synthetic oligonucleotide
  misc_feature 1..20: note = Target: ANGPTL3; (-) strand; PAM type: NRG; PAM sequence: AGG
  source 1..20: mol_type = other DNA
ttaggatcatggttcgctgc

SEQ ID NO: 8154 - DNA, 20 bp, synthetic construct
  misc_feature 1..20: note = Description of Artificial Sequence: Synthetic oligonucleotide
  misc_feature 1..20: note = Target: ANGPTL3; (-) strand; PAM type: NRG; PAM sequence: CAG
  source 1..20: mol_type = other DNA
gttaggatcatggttcgctg

SEQ ID NO: 8155 - DNA, 20 bp, synthetic construct
  misc_feature 1..20: note = Description of Artificial Sequence: Synthetic oligonucleotide
  misc_feature 1..20: note = Target: ANGPTL3; (-) strand; PAM type: NRG; PAM sequence: TGG
  source 1..20: mol_type = other DNA
agaatgcagtgttaggatca

SEQ ID NO: 8156 - DNA, 20 bp, synthetic construct
  misc_feature 1..20: note = Description of Artificial Sequence: Synthetic oligonucleotide
  misc_feature 1..20: note = Target: ANGPTL3; (-) strand; PAM type: NRG; PAM sequence: AGG
  source 1..20: mol_type = other DNA
ccaggctagaatgcagtgtt

SEQ ID NO: 8157 - DNA, 20 bp, synthetic construct
  misc_feature 1..20: note = Description of Artificial Sequence: Synthetic oligonucleotide
  misc_feature 1..20: note = Target: ANGPTL3; (-) strand; PAM type: NRG; PAM sequence: TAG
  source 1..20: mol_type = other DNA
cccaggctagaatgcagtgt

SEQ ID NO: 8158 - DNA, 20 bp, synthetic construct
  misc_feature 1..20: note = Description of Artificial Sequence: Synthetic oligonucleotide
  misc_feature 1..20: note = Target: ANGPTL3; (-) strand; PAM type: NRG; PAM sequence: CAG
  source 1..20: mol_type = other DNA
ctgttgcccaggctagaatg

SEQ ID NO: 8159 - DNA, 20 bp, synthetic construct
  misc_feature 1..20: note = Description of Artificial Sequence: Synthetic oligonucleotide
  misc_feature 1..20: note = Target: ANGPTL3; (-) strand; PAM type: NRG; PAM sequence: TAG
  source 1..20: mol_type = other DNA
tctcactctgttgcccaggc

SEQ ID NO: 8160 - DNA, 20 bp, synthetic construct
  misc_feature 1..20: note = Description of Artificial Sequence: Synthetic oligonucleotide
  misc_feature 1..20: note = Target: ANGPTL3; (-) strand; PAM type: NRG; PAM sequence: AGG
  source 1..20: mol_type = other DNA
agagtctcactctgttgccc

SEQ ID NO: 8161 - DNA, 20 bp, synthetic construct
  misc_feature 1..20: note = Description of Artificial Sequence: Synthetic oligonucleotide
  misc_feature 1..20: note = Target: ANGPTL3; (-) strand; PAM type: NRG; PAM sequence: CAG
  source 1..20: mol_type = other DNA
cagagtctcactctgttgcc

SEQ ID NO: 8162 - DNA, 20 bp, synthetic construct
  misc_feature 1..20: note = Description of Artificial Sequence: Synthetic oligonucleotide
  misc_feature 1..20: note = Target: ANGPTL3; (-) strand; PAM type: NRG; PAM sequence: GAG
  source 1..20: mol_type = other DNA
tgaagattttttttgagaca

SEQ ID NO: 8163 - DNA, 20 bp, synthetic construct
  misc_feature 1..20: note = Description of Artificial Sequence: Synthetic oligonucleotide
  misc_feature 1..20: note = Target: ANGPTL3; (-) strand; PAM type: NRG; PAM sequence: CAG
  source 1..20: mol_type = other DNA
tatgaagattttttttgaga

SEQ ID NO: 8164 - DNA, 20 bp, synthetic construct
  misc_feature 1..20: note = Description of Artificial Sequence: Synthetic oligonucleotide
  misc_feature 1..20: note = Target: ANGPTL3; (-) strand; PAM type: NRG; PAM sequence: GAG
  source 1..20: mol_type = other DNA
tttatatgaagatttttttt

SEQ ID NO: 8165 - DNA, 20 bp, synthetic construct
  misc_feature 1..20: note = Description of Artificial Sequence: Synthetic oligonucleotide
  misc_feature 1..20: note = Target: ANGPTL3; (-) strand; PAM type: NRG; PAM sequence: AAG
  source 1..20: mol_type = other DNA
gaaataaatatttttatatg

SEQ ID NO: 8166 - DNA, 20 bp, synthetic construct
  misc_feature 1..20: note = Description of Artificial Sequence: Synthetic oligonucleotide
  misc_feature 1..20: note = Target: ANGPTL3; (-) strand; PAM type: NRG; PAM sequence: GGG
  source 1..20: mol_type = other DNA
tcactttttaaatacttggg

SEQ ID NO: 8167 - DNA, 20 bp, synthetic construct
  misc_feature 1..20: note = Description of Artificial Sequence: Synthetic oligonucleotide
  misc_feature 1..20: note = Target: ANGPTL3; (-) strand; PAM type: NRG; PAM sequence: GGG
  source 1..20: mol_type = other DNA
atcactttttaaatacttgg

SEQ ID NO: 8168 - DNA, 20 bp, synthetic construct
  misc_feature 1..20: note = Description of Artificial Sequence: Synthetic oligonucleotide
  misc_feature 1..20: note = Target: ANGPTL3; (-) strand; PAM type: NRG; PAM sequence: GGG
  source 1..20: mol_type = other DNA
catcactttttaaatacttg

SEQ ID NO: 8169 - DNA, 20 bp, synthetic construct
  misc_feature 1..20: note = Description of Artificial Sequence: Synthetic oligonucleotide
  misc_feature 1..20: note = Target: ANGPTL3; (-) strand; PAM type: NRG; PAM sequence: GGG
  source 1..20: mol_type = other DNA
acatcactttttaaatactt

SEQ ID NO: 8170 - DNA, 20 bp, synthetic construct
  misc_feature 1..20: note = Description of Artificial Sequence: Synthetic oligonucleotide
  misc_feature 1..20: note = Target: ANGPTL3; (-) strand; PAM type: NRG; PAM sequence: TGG
  source 1..20: mol_type = other DNA
aacatcactttttaaatact

SEQ ID NO: 8171 - DNA, 20 bp, synthetic construct
  misc_feature 1..20: note = Description of Artificial Sequence: Synthetic oligonucleotide
  misc_feature 1..20: note = Target: ANGPTL3; (-) strand; PAM type: NRG; PAM sequence: AGG
  source 1..20: mol_type = other DNA
ataaacatgacacatcttct

SEQ ID NO: 8172 - DNA, 20 bp, synthetic construct
  misc_feature 1..20: note = Description of Artificial Sequence: Synthetic oligonucleotide
  misc_feature 1..20: note = Target: ANGPTL3; (-) strand; PAM type: NRG; PAM sequence: TAG
  source 1..20: mol_type = other DNA
gataaacatgacacatcttc

SEQ ID NO: 8173 - DNA, 20 bp, synthetic construct
  misc_feature 1..20: note = Description of Artificial Sequence: Synthetic oligonucleotide
  misc_feature 1..20: note = Target: ANGPTL3; (-) strand; PAM type: NRG; PAM sequence: AGG
  source 1..20: mol_type = other DNA
tatgggacgtgcaagttcac

SEQ ID NO: 8174 - DNA, 20 bp, synthetic construct
  misc_feature 1..20: note = Description of Artificial Sequence: Synthetic oligonucleotide
  misc_feature 1..20: note = Target: ANGPTL3; (-) strand; PAM type: NRG; PAM sequence: CAG
  source 1..20: mol_type = other DNA
atatgggacgtgcaagttca

SEQ ID NO: 8175 - DNA, 20 bp, synthetic construct
  misc_feature 1..20: note = Description of Artificial Sequence: Synthetic oligonucleotide
  misc_feature 1..20: note = Target: ANGPTL3; (-) strand; PAM type: NRG; PAM sequence: AAG
  source 1..20: mol_type = other DNA
cacaactatatgggacgtgc

SEQ ID NO: 8176 - DNA, 20 bp, synthetic construct
  misc_feature 1..20: note = Description of Artificial Sequence: Synthetic oligonucleotide
  misc_feature 1..20: note = Target: ANGPTL3; (-) strand; PAM type: NRG; PAM sequence: GGG
  source 1..20: mol_type = other DNA
ttgtgagggcacaactatat

SEQ ID NO: 8177 - DNA, 20 bp, synthetic construct
  misc_feature 1..20: note = Description of Artificial Sequence: Synthetic oligonucleotide
  misc_feature 1..20: note = Target: ANGPTL3; (-) strand; PAM type: NRG; PAM sequence: TGG
  source 1..20: mol_type = other DNA
cttgtgagggcacaactata

SEQ ID NO: 8178 - DNA, 20 bp, synthetic construct
  misc_feature 1..20: note = Description of Artificial Sequence: Synthetic oligonucleotide
  misc_feature 1..20: note = Target: ANGPTL3; (-) strand; PAM type: NRG; PAM sequence: GGG
  source 1..20: mol_type = other DNA
tggagtatacattcttgtga

SEQ ID NO: 8179 - DNA, 20 bp, synthetic construct
  misc_feature 1..20: note = Description of Artificial Sequence: Synthetic oligonucleotide
  misc_feature 1..20: note = Target: ANGPTL3; (-) strand; PAM type: NRG; PAM sequence: AGG
  source 1..20: mol_type = other DNA
ttggagtatacattcttgtg

SEQ ID NO: 8180 - DNA, 20 bp, synthetic construct
  misc_feature 1..20: note = Description of Artificial Sequence: Synthetic oligonucleotide
  misc_feature 1..20: note = Target: ANGPTL3; (-) strand; PAM type: NRG; PAM sequence: GAG
  source 1..20: mol_type = other DNA
attggagtatacattcttgt

SEQ ID NO: 8181 - DNA, 20 bp, synthetic construct
  misc_feature 1..20: note = Description of Artificial Sequence: Synthetic oligonucleotide
  misc_feature 1..20: note = Target: ANGPTL3; (-) strand; PAM type: NRG; PAM sequence: GAG
  source 1..20: mol_type = other DNA
ggcctatactcttctaattg

SEQ ID NO: 8182 - DNA, 20 bp, synthetic construct
  misc_feature 1..20: note = Description of Artificial Sequence: Synthetic oligonucleotide
  misc_feature 1..20: note = Target: ANGPTL3; (-) strand; PAM type: NRG; PAM sequence: TGG
  source 1..20: mol_type = other DNA
aaggcctatactcttctaat

SEQ ID NO: 8183 - DNA, 20 bp, synthetic construct
  misc_feature 1..20: note = Description of Artificial Sequence: Synthetic oligonucleotide
  misc_feature 1..20: note = Target: ANGPTL3; (-) strand; PAM type: NRG; PAM sequence: AGG
  source 1..20: mol_type = other DNA
gattttggattttgttccaa

SEQ ID NO: 8184 - DNA, 20 bp, synthetic construct
  misc_feature 1..20: note = Description of Artificial Sequence: Synthetic oligonucleotide
  misc_feature 1..20: note = Target: ANGPTL3; (-) strand; PAM type: NRG; PAM sequence: AAG
  source 1..20: mol_type = other DNA
ggattttggattttgttcca

SEQ ID NO: 8185 - DNA, 20 bp, synthetic construct
  misc_feature 1..20: note = Description of Artificial Sequence: Synthetic oligonucleotide
  misc_feature 1..20: note = Target: ANGPTL3; (-) strand; PAM type: NRG; PAM sequence: TGG
  source 1..20: mol_type = other DNA
ttgaaaacctggaaggattt

SEQ ID NO: 8186 - DNA, 20 bp, synthetic construct
  misc_feature 1..20: note = Description of Artificial Sequence: Synthetic oligonucleotide
  misc_feature 1..20: note = Target: ANGPTL3; (-) strand; PAM type: NRG; PAM sequence: AGG
  source 1..20: mol_type = other DNA
gagacttttgaaaacctgga

SEQ ID NO: 8187 - DNA, 20 bp, synthetic construct
  misc_feature 1..20: note = Description of Artificial Sequence: Synthetic oligonucleotide
  misc_feature 1..20: note = Target: ANGPTL3; (-) strand; PAM type: NRG; PAM sequence: AAG
  source 1..20: mol_type = other DNA
agagacttttgaaaacctgg

SEQ ID NO: 8188 - DNA, 20 bp, synthetic construct
  misc_feature 1..20: note = Description of Artificial Sequence: Synthetic oligonucleotide
  misc_feature 1..20: note = Target: ANGPTL3; (-) strand; PAM type: NRG; PAM sequence: TGG
  source 1..20: mol_type = other DNA
gatagagacttttgaaaacc

SEQ ID NO: 8189 - DNA, 20 bp, synthetic construct
  misc_feature 1..20: note = Description of Artificial Sequence: Synthetic oligonucleotide
  misc_feature 1..20: note = Target: ANGPTL3; (-) strand; PAM type: NRG; PAM sequence: GAG
  source 1..20: mol_type = other DNA
taatttggggccaggtgata

SEQ ID NO: 8190 - DNA, 20 bp, synthetic construct
  misc_feature 1..20: note = Description of Artificial Sequence: Synthetic oligonucleotide
  misc_feature 1..20: note = Target: ANGPTL3; (-) strand; PAM type: NRG; PAM sequence: TAG
  source 1..20: mol_type = other DNA
ggtaatttggggccaggtga

SEQ ID NO: 8191 - DNA, 20 bp, synthetic construct
  misc_feature 1..20: note = Description of Artificial Sequence: Synthetic oligonucleotide
  misc_feature 1..20: note = Target: ANGPTL3; (-) strand; PAM type: NRG; PAM sequence: AGG
  source 1..20: mol_type = other DNA
tgaagaggtaatttggggcc

SEQ ID NO: 8192 - DNA, 20 bp, synthetic construct
  misc_feature 1..20: note = Description of Artificial Sequence: Synthetic oligonucleotide
  misc_feature 1..20: note = Target: ANGPTL3; (-) strand; PAM type: NRG; PAM sequence: CAG
  source 1..20: mol_type = other DNA
ctgaagaggtaatttggggc

SEQ ID NO: 8193 - DNA, 20 bp, synthetic construct
  misc_feature 1..20: note = Description of Artificial Sequence: Synthetic oligonucleotide
  misc_feature 1..20: note = Target: ANGPTL3; (-) strand; PAM type: NRG; PAM sequence: GGG
  source 1..20: mol_type = other DNA
atggctgaagaggtaatttg

SEQ ID NO: 8194 - DNA, 20 bp, synthetic construct
  misc_feature 1..20: note = Description of Artificial Sequence: Synthetic oligonucleotide
  misc_feature 1..20: note = Target: ANGPTL3; (-) strand; PAM type: NRG; PAM sequence: GGG
  source 1..20: mol_type = other DNA
aatggctgaagaggtaattt

SEQ ID NO: 8195 - DNA, 20 bp, synthetic construct
  misc_feature 1..20: note = Description of Artificial Sequence: Synthetic oligonucleotide
  misc_feature 1..20: note = Target: ANGPTL3; (-) strand; PAM type: NRG; PAM sequence: TGG
  source 1..20: mol_type = other DNA
aaatggctgaagaggtaatt

SEQ ID NO: 8196 - DNA, 20 bp, synthetic construct
  misc_feature 1..20: note = Description of Artificial Sequence: Synthetic oligonucleotide
  misc_feature 1..20: note = Target: ANGPTL3; (-) strand; PAM type: NRG; PAM sequence: AGG
  source 1..20: mol_type = other DNA
gtgggaaaaaatggctgaag

SEQ ID NO: 8197 - DNA, 20 bp, synthetic construct
  misc_feature 1..20: note = Description of Artificial Sequence: Synthetic oligonucleotide
  misc_feature 1..20: note = Target: ANGPTL3; (-) strand; PAM type: NRG; PAM sequence: GAG
  source 1..20: mol_type = other DNA
tgtgggaaaaaatggctgaa

SEQ ID NO: 8198 - DNA, 20 bp, synthetic construct
  misc_feature 1..20: note = Description of Artificial Sequence: Synthetic oligonucleotide
  misc_feature 1..20: note = Target: ANGPTL3; (-) strand; PAM type: NRG; PAM sequence: AAG
  source 1..20: mol_type = other DNA
gttgtgggaaaaaatggctg

SEQ ID NO: 8199 - DNA, 20 bp, synthetic construct
  misc_feature 1..20: note = Description of Artificial Sequence: Synthetic oligonucleotide
  misc_feature 1..20: note = Target: ANGPTL3; (-) strand; PAM type: NRG; PAM sequence: TGG
  source 1..20: mol_type = other DNA
gtttgtgttgtgggaaaaaa

SEQ ID NO: 8200 - DNA, 20 bp, synthetic construct
  misc_feature 1..20: note = Description of Artificial Sequence: Synthetic oligonucleotide
  misc_feature 1..20: note = Target: ANGPTL3; (-) strand; PAM type: NRG; PAM sequence: GGG
  source 1..20: mol_type = other DNA
gagcagaaggtttgtgttgt

SEQ ID NO: 8201 - DNA, 20 bp, synthetic construct
  misc_feature 1..20: note = Description of Artificial Sequence: Synthetic oligonucleotide
  misc_feature 1..20: note = Target: ANGPTL3; (-) strand; PAM type: NRG; PAM sequence: TGG
  source 1..20: mol_type = other DNA
agagcagaaggtttgtgttg

SEQ ID NO: 8202 - DNA, 20 bp, synthetic construct
  misc_feature 1..20: note = Description of Artificial Sequence: Synthetic oligonucleotide
  misc_feature 1..20: note = Target: ANGPTL3; (-) strand; PAM type: NRG; PAM sequence: AGG
  source 1..20: mol_type = other DNA
atcgttttgatgagagcaga

SEQ ID NO: 8203 - DNA, 20 bp, synthetic construct
  misc_feature 1..20: note = Description of Artificial Sequence: Synthetic oligonucleotide
  misc_feature 1..20: note = Target: ANGPTL3; (-) strand; PAM type: NRG; PAM sequence: AAG
  source 1..20: mol_type = other DNA
gatcgttttgatgagagcag

SEQ ID NO: 8204 - DNA, 20 bp, synthetic construct
  misc_feature 1..20: note = Description of Artificial Sequence: Synthetic oligonucleotide
  misc_feature 1..20: note = Target: ANGPTL3; (-) strand; PAM type: NRG; PAM sequence: CAG
  source 1..20: mol_type = other DNA
gtagatcgttttgatgagag

SEQ ID NO: 8205 - DNA, 20 bp, synthetic construct
  misc_feature 1..20: note = Description of Artificial Sequence: Synthetic oligonucleotide
  misc_feature 1..20: note = Target: ANGPTL3; (-) strand; PAM type: NRG; PAM sequence: GAG
  source 1..20: mol_type = other DNA
aaagtagatcgttttgatga

SEQ ID NO: 8206 - DNA, 20 bp, synthetic construct
  misc_feature 1..20: note = Description of Artificial Sequence: Synthetic oligonucleotide
  misc_feature 1..20: note = Target: ANGPTL3; (-) strand; PAM type: NRG; PAM sequence: GAG
  source 1..20: mol_type = other DNA
taaaagtagatcgttttgat

SEQ ID NO: 8207 - DNA, 20 bp, synthetic construct
  misc_feature 1..20: note = Description of Artificial Sequence: Synthetic oligonucleotide
  misc_feature 1..20: note = Target: ANGPTL3; (-) strand; PAM type: NRG; PAM sequence: TAG
  source 1..20: mol_type = other DNA
atagaggagatgtttaaaag

SEQ ID NO: 8208 - DNA, 20 bp, synthetic construct
  misc_feature 1..20: note = Description of Artificial Sequence: Synthetic oligonucleotide
  misc_feature 1..20: note = Target: ANGPTL3; (-) strand; PAM type: NRG; PAM sequence: AAG
  source 1..20: mol_type = other DNA
ggcatagaggagatgtttaa

SEQ ID NO: 8209 - DNA, 20 bp, synthetic construct
  misc_feature 1..20: note = Description of Artificial Sequence: Synthetic oligonucleotide
  misc_feature 1..20: note = Target: ANGPTL3; (-) strand; PAM type: NRG; PAM sequence: GAG
  source 1..20: mol_type = other DNA
tacattaggaaggcatagag

SEQ ID NO: 8210 - DNA, 20 bp, synthetic construct
  misc_feature 1..20: note = Description of Artificial Sequence: Synthetic oligonucleotide
  misc_feature 1..20: note = Target: ANGPTL3; (-) strand; PAM type: NRG; PAM sequence: AGG
  source 1..20: mol_type = other DNA
aatacattaggaaggcatag

SEQ ID NO: 8211 - DNA, 20 bp, synthetic construct
  misc_feature 1..20: note = Description of Artificial Sequence: Synthetic oligonucleotide
  misc_feature 1..20: note = Target: ANGPTL3; (-) strand; PAM type: NRG; PAM sequence: GAG
  source 1..20: mol_type = other DNA
gaatacattaggaaggcata

SEQ ID NO: 8212 - DNA, 20 bp, synthetic construct
  misc_feature 1..20: note = Description of Artificial Sequence: Synthetic oligonucleotide
  misc_feature 1..20: note = Target: ANGPTL3; (-) strand; PAM type: NRG; PAM sequence: TAG
  source 1..20: mol_type = other DNA
tggaatacattaggaaggca

SEQ ID NO: 8213 - DNA, 20 bp, synthetic construct
  misc_feature 1..20: note = Description of Artificial Sequence: Synthetic oligonucleotide
  misc_feature 1..20: note = Target: ANGPTL3; (-) strand; PAM type: NRG; PAM sequence: AGG
  source 1..20: mol_type = other DNA
acaaatggaatacattagga

SEQ ID NO: 8214 - DNA, 20 bp, synthetic construct
  misc_feature 1..20: note = Description of Artificial Sequence: Synthetic oligonucleotide
  misc_feature 1..20: note = Target: ANGPTL3; (-) strand; PAM type: NRG; PAM sequence: AAG
  source 1..20: mol_type = other DNA
gacaaatggaatacattagg

SEQ ID NO: 8215 - DNA, 20 bp, synthetic construct
  misc_feature 1..20: note = Description of Artificial Sequence: Synthetic oligonucleotide
  misc_feature 1..20: note = Target: ANGPTL3; (-) strand; PAM type: NRG; PAM sequence: AGG
  source 1..20: mol_type = other DNA
ctagacaaatggaatacatt

SEQ ID NO: 8216 - DNA, 20 bp, synthetic construct
  misc_feature 1..20: note = Description of Artificial Sequence: Synthetic oligonucleotide
  misc_feature 1..20: note = Target: ANGPTL3; (-) strand; PAM type: NRG; PAM sequence: TAG
  source 1..20: mol_type = other DNA
tctagacaaatggaatacat

SEQ ID NO: 8217 - DNA, 20 bp, synthetic construct
  misc_feature 1..20: note = Description of Artificial Sequence: Synthetic oligonucleotide
  misc_feature 1..20: note = Target: ANGPTL3; (-) strand; PAM type: NRG; PAM sequence: TGG
  source 1..20: mol_type = other DNA
ggggagacattctagacaaa

SEQ ID NO: 8218 - DNA, 20 bp, synthetic construct
  misc_feature 1..20: note = Description of Artificial Sequence: Synthetic oligonucleotide
  misc_feature 1..20: note = Target: ANGPTL3; (-) strand; PAM type: NRG; PAM sequence: TAG
  source 1..20: mol_type = other DNA
aaatgtgtggggagacattc

SEQ ID NO: 8219 - DNA, 20 bp, synthetic construct
  misc_feature 1..20: note = Description of Artificial Sequence: Synthetic oligonucleotide
  misc_feature 1..20: note = Target: ANGPTL3; (-) strand; PAM type: NRG; PAM sequence: GAG
  source 1..20: mol_type = other DNA
gccaatcagaaatgtgtggg

SEQ ID NO: 8220 - DNA, 20 bp, synthetic construct
  misc_feature 1..20: note = Description of Artificial Sequence: Synthetic oligonucleotide
  misc_feature 1..20: note = Target: ANGPTL3; (-) strand; PAM type: NRG; PAM sequence: GGG
  source 1..20: mol_type = other DNA
tagccaatcagaaatgtgtg

SEQ ID NO: 8221 - DNA, 20 bp, synthetic construct
  misc_feature 1..20: note = Description of Artificial Sequence: Synthetic oligonucleotide
  misc_feature 1..20: note = Target: ANGPTL3; (-) strand; PAM type: NRG; PAM sequence: GGG
  source 1..20: mol_type = other DNA
ctagccaatcagaaatgtgt

SEQ ID NO: 8222 - DNA, 20 bp, synthetic construct
  misc_feature 1..20: note = Description of Artificial Sequence: Synthetic oligonucleotide
  misc_feature 1..20: note = Target: ANGPTL3; (-) strand; PAM type: NRG; PAM sequence: TGG
  source 1..20: mol_type = other DNA
tctagccaatcagaaatgtg

SEQ ID NO: 8223 - DNA, 20 bp, synthetic construct
  misc_feature 1..20: note = Description of Artificial Sequence: Synthetic oligonucleotide
  misc_feature 1..20: note = Target: ANGPTL3; (-) strand; PAM type: NRG; PAM sequence: CAG
  source 1..20: mol_type = other DNA
tacggcacaatctagccaat

SEQ ID NO: 8224 - DNA, 20 bp, synthetic construct
  misc_feature 1..20: note = Description of Artificial Sequence: Synthetic oligonucleotide
  misc_feature 1..20: note = Target: ANGPTL3; (-) strand; PAM type: NRG; PAM sequence: TAG
  source 1..20: mol_type = other DNA
ccttaaaatacggcacaatc

SEQ ID NO: 8225 - DNA, 20 bp, synthetic construct
  misc_feature 1..20: note = Description of Artificial Sequence: Synthetic oligonucleotide
  misc_feature 1..20: note = Target: ANGPTL3; (-) strand; PAM type: NRG; PAM sequence: CGG
  source 1..20: mol_type = other DNA
gatatctgcaccttaaaata

SEQ ID NO: 8226 - DNA, 20 bp, synthetic construct
  misc_feature 1..20: note = Description of Artificial Sequence: Synthetic oligonucleotide
  misc_feature 1..20: note = Target: ANGPTL3; (-) strand; PAM type: NRG; PAM sequence: GAG
  source 1..20: mol_type = other DNA
agaatatttgtggaagaatt

SEQ ID NO: 8227 - DNA, 20 bp, synthetic construct
  misc_feature 1..20: note = Description of Artificial Sequence: Synthetic oligonucleotide
  misc_feature 1..20: note = Target: ANGPTL3; (-) strand; PAM type: NRG; PAM sequence: AAG
  source 1..20: mol_type = other DNA
atttactagaatatttgtgg

SEQ ID NO: 8228 - DNA, 20 bp, synthetic construct
  misc_feature 1..20: note = Description of Artificial Sequence: Synthetic oligonucleotide
  misc_feature 1..20: note = Target: ANGPTL3; (-) strand; PAM type: NRG; PAM sequence: TGG
  source 1..20: mol_type = other DNA
gccatttactagaatatttg

SEQ ID NO: 8229 - DNA, 20 bp, synthetic construct
  misc_feature 1..20: note = Description of Artificial Sequence: Synthetic oligonucleotide
  misc_feature 1..20: note = Target: ANGPTL3; (-) strand; PAM type: NRG; PAM sequence: TAG
  source 1..20: mol_type = other DNA
atgaacaagctgccatttac

SEQ ID NO: 8230 - DNA, 20 bp, synthetic construct
  misc_feature 1..20: note = Description of Artificial Sequence: Synthetic oligonucleotide
  misc_feature 1..20: note = Target: ANGPTL3; (-) strand; PAM type: NRG; PAM sequence: AAG
  source 1..20: mol_type = other DNA
ctgtgtggtttcagatgaac

SEQ ID NO: 8231 - DNA, 20 bp, synthetic construct
  misc_feature 1..20: note = Description of Artificial Sequence: Synthetic oligonucleotide
  misc_feature 1..20: note = Target: ANGPTL3; (-) strand; PAM type: NRG; PAM sequence: CAG
  source 1..20: mol_type = other DNA
acagtaattctgtgtggttt

SEQ ID NO: 8232 - DNA, 20 bp, synthetic construct
  misc_feature 1..20: note = Description of Artificial Sequence: Synthetic oligonucleotide
  misc_feature 1..20: note = Target: ANGPTL3; (-) strand; PAM type: NRG; PAM sequence: TGG
  source 1..20: mol_type = other DNA
gtatggacagtaattctgtg

SEQ ID NO: 8233 - DNA, 20 bp, synthetic construct
  misc_feature 1..20: note = Description of Artificial Sequence: Synthetic oligonucleotide
  misc_feature 1..20: note = Target: ANGPTL3; (-) strand; PAM type: NRG; PAM sequence: CAG
  source 1..20: mol_type = other DNA
tgccatttgaggtgtatgga

SEQ ID NO: 8234 - DNA, 20 bp, synthetic construct
  misc_feature 1..20: note = Description of Artificial Sequence: Synthetic oligonucleotide
  misc_feature 1..20: note = Target: ANGPTL3; (-) strand; PAM type: NRG; PAM sequence: TGG
  source 1..20: mol_type = other DNA
taagtgccatttgaggtgta

SEQ ID NO: 8235 - DNA, 20 bp, synthetic construct
  misc_feature 1..20: note = Description of Artificial Sequence: Synthetic oligonucleotide
  misc_feature 1..20: note = Target: ANGPTL3; (-) strand; PAM type: NRG; PAM sequence: AGG
  source 1..20: mol_type = other DNA
ttctcactaagtgccatttg

SEQ ID NO: 8236 - DNA, 20 bp, synthetic construct
  misc_feature 1..20: note = Description of Artificial Sequence: Synthetic oligonucleotide
  misc_feature 1..20: note = Target: ANGPTL3; (-) strand; PAM type: NRG; PAM sequence: GAG
  source 1..20: mol_type = other DNA
tttctcactaagtgccattt

SEQ ID NO: 8237 - DNA, 20 bp, synthetic construct
  misc_feature 1..20: note = Description of Artificial Sequence: Synthetic oligonucleotide
  misc_feature 1..20: note = Target: ANGPTL3; (-) strand; PAM type: NRG; PAM sequence: AAG
  source 1..20: mol_type = other DNA
attctgtgtattttctcact

SEQ ID NO: 8238 - DNA, 20 bp, synthetic construct
  misc_feature 1..20: note = Description of Artificial Sequence: Synthetic oligonucleotide
  misc_feature 1..20: note = Target: ANGPTL3; (-) strand; PAM type: NRG; PAM sequence: CAG
  source 1..20: mol_type = other DNA
gagcttttagtactattttt

SEQ ID NO: 8239 - DNA, 20 bp, synthetic construct
  misc_feature 1..20: note = Description of Artificial Sequence: Synthetic oligonucleotide
  misc_feature 1..20: note = Target: ANGPTL3; (-) strand; PAM type: NRG; PAM sequence: TAG
  source 1..20: mol_type = other DNA
tttgatgcttttggagcttt

SEQ ID NO: 8240 - DNA, 20 bp, synthetic construct
  misc_feature 1..20: note = Description of Artificial Sequence: Synthetic oligonucleotide
  misc_feature 1..20: note = Target: ANGPTL3; (-) strand; PAM type: NRG; PAM sequence: GAG
  source 1..20: mol_type = other DNA
gactatctttgatgcttttg

SEQ ID NO: 8241 - DNA, 20 bp, synthetic construct
  misc_feature 1..20: note = Description of Artificial Sequence: Synthetic oligonucleotide
  misc_feature 1..20: note = Target: ANGPTL3; (-) strand; PAM type: NRG; PAM sequence: TGG
  source 1..20: mol_type = other DNA
ctgactatctttgatgcttt

SEQ ID NO: 8242 - DNA, 20 bp, synthetic construct
  misc_feature 1..20: note = Description of Artificial Sequence: Synthetic oligonucleotide
  misc_feature 1..20: note = Target: ANGPTL3; (-) strand; PAM type: NRG; PAM sequence: AGG
  source 1..20: mol_type = other DNA
ttcagtaattcactaaaatc

SEQ ID NO: 8243 - DNA, 20 bp, synthetic construct
  misc_feature 1..20: note = Description of Artificial Sequence: Synthetic oligonucleotide
  misc_feature 1..20: note = Target: ANGPTL3; (-) strand; PAM type: NRG; PAM sequence: CAG
  source 1..20: mol_type = other DNA
tttcagtaattcactaaaat

SEQ ID NO: 8244 - DNA, 20 bp, synthetic construct
  misc_feature 1..20: note = Description of Artificial Sequence: Synthetic oligonucleotide
  misc_feature 1..20: note = Target: ANGPTL3; (-) strand; PAM type: NRG; PAM sequence: CAG
  source 1..20: mol_type = other DNA
ctcttgatatagaaattttt

SEQ ID NO: 8245 - DNA, 20 bp, synthetic construct
  misc_feature 1..20: note = Description of Artificial Sequence: Synthetic oligonucleotide
  misc_feature 1..20: note = Target: ANGPTL3; (-) strand; PAM type: NRG; PAM sequence: TAG
  source 1..20: mol_type = other DNA
ttcaaaataaactcttgata

SEQ ID NO: 8246 - DNA, 20 bp, synthetic construct
  misc_feature 1..20: note = Description of Artificial Sequence: Synthetic oligonucleotide
  misc_feature 1..20: note = Target: ANGPTL3; (-) strand; PAM type: NRG; PAM sequence: TGG
  source 1..20: mol_type = other DNA
ggtttcagtaaaattcatac

SEQ ID NO: 8247 - DNA, 20 bp, synthetic construct
  misc_feature 1..20: note = Description of Artificial Sequence: Synthetic oligonucleotide
  misc_feature 1..20: note = Target: ANGPTL3; (-) strand; PAM type: NRG; PAM sequence: CAG
  source 1..20: mol_type = other DNA
gacatgtgtgtacttggttt

SEQ ID NO: 8248 - DNA, 20 bp, synthetic construct
  misc_feature 1..20: note = Description of Artificial Sequence: Synthetic oligonucleotide
  misc_feature 1..20: note = Target: ANGPTL3; (-) strand; PAM type: NRG; PAM sequence: TGG
  source 1..20: mol_type = other DNA
taatgagacatgtgtgtact

SEQ ID NO: 8249 - DNA, 20 bp, synthetic construct
  misc_feature 1..20: note = Description of Artificial Sequence: Synthetic oligonucleotide
  misc_feature 1..20: note = Target: ANGPTL3; (-) strand; PAM type: NRG; PAM sequence: GAG
  source 1..20: mol_type = other DNA
acactagattacctcataat

SEQ ID NO: 8250 - DNA, 20 bp, synthetic construct
  misc_feature 1..20: note = Description of Artificial Sequence: Synthetic oligonucleotide
  misc_feature 1..20: note = Target: ANGPTL3; (-) strand; PAM type: NRG; PAM sequence: TAG
  source 1..20: mol_type = other DNA
ggaaatagattatactacac

SEQ ID NO: 8251 - DNA, 20 bp, synthetic construct
  misc_feature 1..20: note = Description of Artificial Sequence: Synthetic oligonucleotide
  misc_feature 1..20: note = Target: ANGPTL3; (-) strand; PAM type: NRG; PAM sequence: TAG
  source 1..20: mol_type = other DNA
gatgacagagtgtatggaaa

SEQ ID NO: 8252 - DNA, 20 bp, synthetic construct
  misc_feature 1..20: note = Description of Artificial Sequence: Synthetic oligonucleotide
  misc_feature 1..20: note = Target: ANGPTL3; (-) strand; PAM type: NRG; PAM sequence: TGG
  source 1..20: mol_type = other DNA
ttccaggatgacagagtgta

SEQ ID NO: 8253 - DNA, 20 bp, synthetic construct
  misc_feature 1..20: note = Description of Artificial Sequence: Synthetic oligonucleotide
  misc_feature 1..20: note = Target: ANGPTL3; (-) strand; PAM type: NRG; PAM sequence: GAG
  source 1..20: mol_type = other DNA
atgctgattccaggatgaca

SEQ ID NO: 8254 - DNA, 20 bp, synthetic construct
  misc_feature 1..20: note = Description of Artificial Sequence: Synthetic oligonucleotide
  misc_feature 1..20: note = Target: ANGPTL3; (-) strand; PAM type: NRG; PAM sequence: CAG
  source 1..20: mol_type = other DNA
atatgctgattccaggatga

SEQ ID NO: 8255 - DNA, 20 bp, synthetic construct
  misc_feature 1..20: note = Description of Artificial Sequence: Synthetic oligonucleotide
  misc_feature 1..20: note = Target: ANGPTL3; (-) strand; PAM type: NRG; PAM sequence: AGG
  source 1..20: mol_type = other DNA
catgaaaatatgctgattcc

SEQ ID NO: 8256 - DNA, 20 bp, synthetic construct
  misc_feature 1..20: note = Description of Artificial Sequence: Synthetic oligonucleotide
  misc_feature 1..20: note = Target: ANGPTL3; (-) strand; PAM type: NRG; PAM sequence: CAG
  source 1..20: mol_type = other DNA
gcatgaaaatatgctgattc

SEQ ID NO: 8257 - DNA, 20 bp, synthetic construct
  misc_feature 1..20: note = Description of Artificial Sequence: Synthetic oligonucleotide
  misc_feature 1..20: note = Target: ANGPTL3; (-) strand; PAM type: NRG; PAM sequence: AAG
  source 1..20: mol_type = other DNA
ctattaggaagtaaagatac

SEQ ID NO: 8258 - DNA, 20 bp, synthetic construct
  misc_feature 1..20: note = Description of Artificial Sequence: Synthetic oligonucleotide
  misc_feature 1..20: note = Target: ANGPTL3; (-) strand; PAM type: NRG; PAM sequence: AAG
  source 1..20: mol_type = other DNA
agttatgctattaggaagta

SEQ ID NO: 8259 - DNA, 20 bp, synthetic construct
  misc_feature 1..20: note = Description of Artificial Sequence: Synthetic oligonucleotide
  misc_feature 1..20: note = Target: ANGPTL3; (-) strand; PAM type: NRG; PAM sequence: AAG
  source 1..20: mol_type = other DNA
ccatgagttatgctattagg

SEQ ID NO: 8260 - DNA, 20 bp, synthetic construct
  misc_feature 1..20: note = Description of Artificial Sequence: Synthetic oligonucleotide
  misc_feature 1..20: note = Target: ANGPTL3; (-) strand; PAM type: NRG; PAM sequence: AGG
  source 1..20: mol_type = other DNA
cttccatgagttatgctatt

SEQ ID NO: 8261 - DNA, 20 bp, synthetic construct
  misc_feature 1..20: note = Description of Artificial Sequence: Synthetic oligonucleotide
  misc_feature 1..20: note = Target: ANGPTL3; (-) strand; PAM type: NRG; PAM sequence: TAG
  source 1..20: mol_type = other DNA
acttccatgagttatgctat

SEQ ID NO: 8262 - DNA, 20 bp, synthetic construct
  misc_feature 1..20: note = Description of Artificial Sequence: Synthetic oligonucleotide
  misc_feature 1..20: note = Target: ANGPTL3; (-) strand; PAM type: NRG; PAM sequence: GAG
  source 1..20: mol_type = other DNA
atgagttagttgacttccat

SEQ ID NO: 8263 - DNA, 20 bp, synthetic construct
  misc_feature 1..20: note = Description of Artificial Sequence: Synthetic oligonucleotide
  misc_feature 1..20: note = Target: ANGPTL3; (-) strand; PAM type: NRG; PAM sequence: TAG
  source 1..20: mol_type = other DNA
tctaaaattaatgaatgagt

SEQ ID NO: 8264 - DNA, 20 bp, synthetic construct
  misc_feature 1..20: note = Description of Artificial Sequence: Synthetic oligonucleotide
  misc_feature 1..20: note = Target: ANGPTL3; (-) strand; PAM type: NRG; PAM sequence: GAG
  source 1..20: mol_type = other DNA
catttctaaaattaatgaat

SEQ ID NO: 8265 - DNA, 20 bp, synthetic construct
  misc_feature 1..20: note = Description of Artificial Sequence: Synthetic oligonucleotide
  misc_feature 1..20: note = Target: ANGPTL3; (-) strand; PAM type: NRG; PAM sequence: AAG
  source 1..20: mol_type = other DNA
acaaatagtagatgctcaat

SEQ ID NO: 8266 - DNA, 20 bp, synthetic construct
  misc_feature 1..20: note = Description of Artificial Sequence: Synthetic oligonucleotide
  misc_feature 1..20: note = Target: ANGPTL3; (-) strand; PAM type: NRG; PAM sequence: TAG
  source 1..20: mol_type = other DNA
tttttaaaggagacaaatag

SEQ ID NO: 8267 - DNA, 20 bp, synthetic construct
  misc_feature 1..20: note = Description of Artificial Sequence: Synthetic oligonucleotide
  misc_feature 1..20: note = Target: ANGPTL3; (-) strand; PAM type: NRG; PAM sequence: TAG
  source 1..20: mol_type = other DNA
tgttttttaaaggagacaaa

SEQ ID NO: 8268 - DNA, 20 bp, synthetic construct
  misc_feature 1..20: note = Description of Artificial Sequence: Synthetic oligonucleotide
  misc_feature 1..20: note = Target: ANGPTL3; (-) strand; PAM type: NRG; PAM sequence: GAG
  source 1..20: mol_type = other DNA
ttggaatatgttttttaaag

SEQ ID NO: 8269 - DNA, 20 bp, synthetic construct
  misc_feature 1..20: note = Description of Artificial Sequence: Synthetic oligonucleotide
  misc_feature 1..20: note = Target: ANGPTL3; (-) strand; PAM type: NRG; PAM sequence: AGG
  source 1..20: mol_type = other DNA
atttggaatatgttttttaa

SEQ ID NO: 8270 - DNA, 20 bp, synthetic construct
  misc_feature 1..20: note = Description of Artificial Sequence: Synthetic oligonucleotide
  misc_feature 1..20: note = Target: ANGPTL3; (-) strand; PAM type: NRG; PAM sequence: AAG
  source 1..20: mol_type = other DNA
aatttggaatatgtttttta

SEQ ID NO: 8271 - DNA, 20 bp, synthetic construct
  misc_feature 1..20: note = Description of Artificial Sequence: Synthetic oligonucleotide
  misc_feature 1..20: note = Target: ANGPTL3; (-) strand; PAM type: NRG; PAM sequence: TGG
  source 1..20: mol_type = other DNA
agtatatatgagtacaaatt

SEQ ID NO: 8272 - DNA, 20 bp, synthetic construct
  misc_feature 1..20: note = Description of Artificial Sequence: Synthetic oligonucleotide
  misc_feature 1..20: note = Target: ANGPTL3; (-) strand; PAM type: NRG; PAM sequence: GAG
  source 1..20: mol_type = other DNA
gcagaaggtagagtatatat

SEQ ID NO: 8273 - DNA, 20 bp, synthetic construct
  misc_feature 1..20: note = Description of Artificial Sequence: Synthetic oligonucleotide
  misc_feature 1..20: note = Target: ANGPTL3; (-) strand; PAM type: NRG; PAM sequence: GAG
  source 1..20: mol_type = other DNA
ttatcctacagcagaaggta

SEQ ID NO: 8274 - DNA, 20 bp, synthetic construct
  misc_feature 1..20: note = Description of Artificial Sequence: Synthetic oligonucleotide
  misc_feature 1..20: note = Target: ANGPTL3; (-) strand; PAM type: NRG; PAM sequence: TAG
  source 1..20: mol_type = other DNA
gattatcctacagcagaagg

SEQ ID NO: 8275 - DNA, 20 bp, synthetic construct
  misc_feature 1..20: note = Description of Artificial Sequence: Synthetic oligonucleotide
  misc_feature 1..20: note = Target: ANGPTL3; (-) strand; PAM type: NRG; PAM sequence: AGG
  source 1..20: mol_type = other DNA
tttgattatcctacagcaga

SEQ ID NO: 8276 - DNA, 20 bp, synthetic construct
  misc_feature 1..20: note = Description of Artificial Sequence: Synthetic oligonucleotide
  misc_feature 1..20: note = Target: ANGPTL3; (-) strand; PAM type: NRG; PAM sequence: AAG
  source 1..20: mol_type = other DNA
atttgattatcctacagcag

SEQ ID NO: 8277 - DNA, 20 bp, synthetic construct
  misc_feature 1..20: note = Description of Artificial Sequence: Synthetic oligonucleotide
  misc_feature 1..20: note = Target: ANGPTL3; (-) strand; PAM type: NRG; PAM sequence: CAG
  source 1..20: mol_type = other DNA
gaaatttgattatcctacag

SEQ ID NO: 8278 - DNA, 20 bp, synthetic construct
  misc_feature 1..20: note = Description of Artificial Sequence: Synthetic oligonucleotide
  misc_feature 1..20: note = Target: ANGPTL3; (-) strand; PAM type: NRG; PAM sequence: CAG
  source 1..20: mol_type = other DNA
aaggaaatttgattatccta

SEQ ID NO: 8279 - DNA, 20 bp, synthetic construct
  misc_feature 1..20: note = Description of Artificial Sequence: Synthetic oligonucleotide
  misc_feature 1..20: note = Target: ANGPTL3; (-) strand; PAM type: NRG; PAM sequence: AGG
  source 1..20: mol_type = other DNA
tgatggggaaaaaaatcaca

SEQ ID NO: 8280 - DNA, 20 bp, synthetic construct
  misc_feature 1..20: note = Description of Artificial Sequence: Synthetic oligonucleotide
  misc_feature 1..20: note = Target: ANGPTL3; (-) strand; PAM type: NRG; PAM sequence: AAG
  source 1..20: mol_type = other DNA
gtgatggggaaaaaaatcac

SEQ ID NO: 8281 - DNA, 20 bp, synthetic construct
  misc_feature 1..20: note = Description of Artificial Sequence: Synthetic oligonucleotide
  misc_feature 1..20: note = Target: ANGPTL3; (-) strand; PAM type: NRG; PAM sequence: GGG
  source 1..20: mol_type = other DNA
gtttatggctgttagtgatg

SEQ ID NO: 8282 - DNA, 20 bp, synthetic construct
  misc_feature 1..20: note = Description of Artificial Sequence: Synthetic oligonucleotide
  misc_feature 1..20: note = Target: ANGPTL3; (-) strand; PAM type: NRG; PAM sequence: GGG
  source 1..20: mol_type = other DNA
agtttatggctgttagtgat

SEQ ID NO: 8283 - DNA, 20 bp, synthetic construct
  misc_feature 1..20: note = Description of Artificial Sequence: Synthetic oligonucleotide
  misc_feature 1..20: note = Target: ANGPTL3; (-) strand; PAM type: NRG; PAM sequence: TGG
  source 1..20: mol_type = other DNA
gagtttatggctgttagtga

SEQ ID NO: 8284 - DNA, 20 bp, synthetic construct
  misc_feature 1..20: note = Description of Artificial Sequence: Synthetic oligonucleotide
  misc_feature 1..20: note = Target: ANGPTL3; (-) strand; PAM type: NRG; PAM sequence: TAG
  source 1..20: mol_type = other DNA
agtgcagagtttatggctgt

SEQ ID NO: 8285 - DNA, 20 bp, synthetic construct
  misc_feature 1..20: note = Description of Artificial Sequence: Synthetic oligonucleotide
  misc_feature 1..20: note = Target: ANGPTL3; (-) strand; PAM type: NRG; PAM sequence: TGG
  source 1..20: mol_type = other DNA
atacataagtgcagagttta

SEQ ID NO: 8286 - DNA, 20 bp, synthetic construct
  misc_feature 1..20: note = Description of Artificial Sequence: Synthetic oligonucleotide
  misc_feature 1..20: note = Target: ANGPTL3; (-) strand; PAM type: NRG; PAM sequence: GAG
  source 1..20: mol_type = other DNA
gtagtacatacataagtgca

SEQ ID NO: 8287 - DNA, 20 bp, synthetic construct
  misc_feature 1..20: note = Description of Artificial Sequence: Synthetic oligonucleotide
  misc_feature 1..20: note = Target: ANGPTL3; (-) strand; PAM type: NRG; PAM sequence: CAG
  source 1..20: mol_type = other DNA
cagtagtacatacataagtg

SEQ ID NO: 8288 - DNA, 20 bp, synthetic construct
  misc_feature 1..20: note = Description of Artificial Sequence: Synthetic oligonucleotide
  misc_feature 1..20: note = Target: ANGPTL3; (-) strand; PAM type: NRG; PAM sequence: AAG
  source 1..20: mol_type = other DNA
tcactcagtagtacatacat

SEQ ID NO: 8289 - DNA, 20 bp, synthetic construct
  misc_feature 1..20: note = Description of Artificial Sequence: Synthetic oligonucleotide
  misc_feature 1..20: note = Target: ANGPTL3; (-) strand; PAM type: NRG; PAM sequence: TAG
  source 1..20: mol_type = other DNA
tgtgtttgataatcactcag

SEQ ID NO: 8290 - DNA, 20 bp, synthetic construct
  misc_feature 1..20: note = Description of Artificial Sequence: Synthetic oligonucleotide
  misc_feature 1..20: note = Target: ANGPTL3; (-) strand; PAM type: NRG; PAM sequence: CAG
  source 1..20: mol_type = other DNA
tgctgtgtttgataatcact

SEQ ID NO: 8291 - DNA, 20 bp, synthetic construct
  misc_feature 1..20: note = Description of Artificial Sequence: Synthetic oligonucleotide
  misc_feature 1..20: note = Target: ANGPTL3; (-) strand; PAM type: NRG; PAM sequence: GGG
  source 1..20: mol_type = other DNA
tgataaaagggccaattgtt

SEQ ID NO: 8292 - DNA, 20 bp, synthetic construct
  misc_feature 1..20: note = Description of Artificial Sequence: Synthetic oligonucleotide
  misc_feature 1..20: note = Target: ANGPTL3; (-) strand; PAM type: NRG; PAM sequence: TGG
  source 1..20: mol_type = other DNA
ttgataaaagggccaattgt

SEQ ID NO: 8293 - DNA, 20 bp, synthetic construct
  misc_feature 1..20: note = Description of Artificial Sequence: Synthetic oligonucleotide
  misc_feature 1..20: note = Target: ANGPTL3; (-) strand; PAM type: NRG; PAM sequence: GGG
  source 1..20: mol_type = other DNA
tactttggactttgataaaa

SEQ ID NO: 8294 - DNA, 20 bp, synthetic construct
  misc_feature 1..20: note = Description of Artificial Sequence: Synthetic oligonucleotide
  misc_feature 1..20: note = Target: ANGPTL3; (-) strand; PAM type: NRG; PAM sequence: AGG
  source 1..20: mol_type = other DNA
atactttggactttgataaa

SEQ ID NO: 8295 - DNA, 20 bp, synthetic construct
  misc_feature 1..20: note = Description of Artificial Sequence: Synthetic oligonucleotide
  misc_feature 1..20: note = Target: ANGPTL3; (-) strand; PAM type: NRG; PAM sequence: AAG
  source 1..20: mol_type = other DNA
aatactttggactttgataa

SEQ ID NO: 8296 - DNA, 20 bp, synthetic construct
  misc_feature 1..20: note = Description of Artificial Sequence: Synthetic oligonucleotide
  misc_feature 1..20: note = Target: ANGPTL3; (-) strand; PAM type: NRG; PAM sequence: TGG
  source 1..20: mol_type = other DNA
gatttgccatgataatactt

SEQ ID NO: 8297 - DNA, 20 bp, synthetic construct
  misc_feature 1..20: note = Description of Artificial Sequence: Synthetic oligonucleotide
  misc_feature 1..20: note = Target: ANGPTL3; (-) strand; PAM type: NRG; PAM sequence: TAG
  source 1..20: mol_type = other DNA
ccagttaagtaattttaccc

SEQ ID NO: 8298 - DNA, 20 bp, synthetic construct
  misc_feature 1..20: note = Description of Artificial Sequence: Synthetic oligonucleotide
  misc_feature 1..20: note = Target: ANGPTL3; (-) strand; PAM type: NRG; PAM sequence: AAG
  source 1..20: mol_type = other DNA
ccttgaactgtgcaccagtt

SEQ ID NO: 8299 - DNA, 20 bp, synthetic construct
  misc_feature 1..20: note = Description of Artificial Sequence: Synthetic oligonucleotide
  misc_feature 1..20: note = Target: ANGPTL3; (-) strand; PAM type: NRG; PAM sequence: CAG
  source 1..20: mol_type = other DNA
catgaccttgaactgtgcac

SEQ ID NO: 8300 - DNA, 20 bp, synthetic construct
  misc_feature 1..20: note = Description of Artificial Sequence: Synthetic oligonucleotide
  misc_feature 1..20: note = Target: ANGPTL3; (-) strand; PAM type: NRG; PAM sequence: TAG
  source 1..20: mol_type = other DNA
gggttataatagaggattgt

SEQ ID NO: 8301 - DNA, 20 bp, synthetic construct
  misc_feature 1..20: note = Description of Artificial Sequence: Synthetic oligonucleotide
  misc_feature 1..20: note = Target: ANGPTL3; (-) strand; PAM type: NRG; PAM sequence: AGG
  source 1..20: mol_type = other DNA
tttattaagggttataatag

SEQ ID NO: 8302 - DNA, 20 bp, synthetic construct
  misc_feature 1..20: note = Description of Artificial Sequence: Synthetic oligonucleotide
  misc_feature 1..20: note = Target: ANGPTL3; (-) strand; PAM type: NRG; PAM sequence: GAG
  source 1..20: mol_type = other DNA
ttttattaagggttataata

SEQ ID NO: 8303 - DNA, 20 bp, synthetic construct
  misc_feature 1..20: note = Description of Artificial Sequence: Synthetic oligonucleotide
  misc_feature 1..20: note = Target: ANGPTL3; (-) strand; PAM type: NRG; PAM sequence: TAG
  source 1..20: mol_type = other DNA
cattttattaagggttataa

SEQ ID NO: 8304 - DNA, 20 bp, synthetic construct
  misc_feature 1..20: note = Description of Artificial Sequence: Synthetic oligonucleotide
  misc_feature 1..20: note = Target: ANGPTL3; (-) strand; PAM type: NRG; PAM sequence: GGG
  source 1..20: mol_type = other DNA
ttaaaacctcattttattaa

SEQ ID NO: 8305 - DNA, 20 bp, synthetic construct
  misc_feature 1..20: note = Description of Artificial Sequence: Synthetic oligonucleotide
  misc_feature 1..20: note = Target: ANGPTL3; (-) strand; PAM type: NRG; PAM sequence: AGG
  source 1..20: mol_type = other DNA
attaaaacctcattttatta

SEQ ID NO: 8306 - DNA, 20 bp, synthetic construct
  misc_feature 1..20: note = Description of Artificial Sequence: Synthetic oligonucleotide
  misc_feature 1..20: note = Target: ANGPTL3; (-) strand; PAM type: NRG; PAM sequence: AAG
  source 1..20: mol_type = other DNA
cattaaaacctcattttatt

SEQ ID NO: 8307 - DNA, 20 bp, synthetic construct
  misc_feature 1..20: note = Description of Artificial Sequence: Synthetic oligonucleotide
  misc_feature 1..20: note = Target: ANGPTL3; (-) strand; PAM type: NRG; PAM sequence: AAG
  source 1..20: mol_type = other DNA
gtattttagatagaattctt

SEQ ID NO: 8308 - DNA, 20 bp, synthetic construct
  misc_feature 1..20: note = Description of Artificial Sequence: Synthetic oligonucleotide
  misc_feature 1..20: note = Target: ANGPTL3; (-) strand; PAM type: NRG; PAM sequence: TAG
  source 1..20: mol_type = other DNA
aacagcctttgtattttaga

SEQ ID NO: 8309 - DNA, 20 bp, synthetic construct
  misc_feature 1..20: note = Description of Artificial Sequence: Synthetic oligonucleotide
  misc_feature 1..20: note = Target: ANGPTL3; (-) strand; PAM type: NRG; PAM sequence: TAG
  source 1..20: mol_type = other DNA
gaaaaacagcctttgtattt

SEQ ID NO: 8310 - DNA, 20 bp, synthetic construct
  misc_feature 1..20: note = Description of Artificial Sequence: Synthetic oligonucleotide
  misc_feature 1..20: note = Target: ANGPTL3; (-) strand; PAM type: NRG; PAM sequence: CAG
  source 1..20: mol_type = other DNA
aaacatgaatttaggaaaaa

SEQ ID NO: 8311 - DNA, 20 bp, synthetic construct
  misc_feature 1..20: note = Description of Artificial Sequence: Synthetic oligonucleotide
  misc_feature 1..20: note = Target: ANGPTL3; (-) strand; PAM type: NRG; PAM sequence: AGG
  source 1..20: mol_type = other DNA
ttaggactaaacatgaattt

SEQ ID NO: 8312 - DNA, 20 bp, synthetic construct
  misc_feature 1..20: note = Description of Artificial Sequence: Synthetic oligonucleotide
  misc_feature 1..20: note = Target: ANGPTL3; (-) strand; PAM type: NRG; PAM sequence: TAG
  source 1..20: mol_type = other DNA
cttaggactaaacatgaatt

SEQ ID NO: 8313 - DNA, 20 bp, synthetic construct
  misc_feature 1..20: note = Description of Artificial Sequence: Synthetic oligonucleotide
  misc_feature 1..20: note = Target: ANGPTL3; (-) strand; PAM type: NRG; PAM sequence: AGG
  source 1..20: mol_type = other DNA
ttagatgtatgactgttctt

SEQ ID NO: 8314 - DNA, 20 bp, synthetic construct
  misc_feature 1..20: note = Description of Artificial Sequence: Synthetic oligonucleotide
  misc_feature 1..20: note = Target: ANGPTL3; (-) strand; PAM type: NRG; PAM sequence: TAG
  source 1..20: mol_type = other DNA
attagatgtatgactgttct

SEQ ID NO: 8315 - DNA, 20 bp, synthetic construct
  misc_feature 1..20: note = Description of Artificial Sequence: Synthetic oligonucleotide
  misc_feature 1..20: note = Target: ANGPTL3; (-) strand; PAM type: NRG; PAM sequence: TAG
  source 1..20: mol_type = other DNA
tatatacccagtcattttat

SEQ ID NO: 8316 - DNA, 20 bp, synthetic construct
  misc_feature 1..20: note = Description of Artificial Sequence: Synthetic oligonucleotide
  misc_feature 1..20: note = Target: ANGPTL3; (-) strand; PAM type: NRG; PAM sequence: CAG
  source 1..20: mol_type = other DNA
gctctttcaaattatatacc

SEQ ID NO: 8317 - DNA, 20 bp, synthetic construct
  misc_feature 1..20: note = Description of Artificial Sequence: Synthetic oligonucleotide
  misc_feature 1..20: note = Target: ANGPTL3; (-) strand; PAM type: NRG; PAM sequence: TAG
  source 1..20: mol_type = other DNA
acaaccttacatcttcaagg

SEQ ID NO: 8318 - DNA, 20 bp, synthetic construct
  misc_feature 1..20: note = Description of Artificial Sequence: Synthetic oligonucleotide
  misc_feature 1..20: note = Target: ANGPTL3; (-) strand; PAM type: NRG; PAM sequence: AGG
  source 1..20: mol_type = other DNA
gctacaaccttacatcttca

SEQ ID NO: 8319 - DNA, 20 bp, synthetic construct
  misc_feature 1..20: note = Description of Artificial Sequence: Synthetic oligonucleotide
  misc_feature 1..20: note = Target: ANGPTL3; (-) strand; PAM type: NRG; PAM sequence: AAG
  source 1..20: mol_type = other DNA
agctacaaccttacatcttc

SEQ ID NO: 8320 - DNA, 20 bp, synthetic construct
  misc_feature 1..20: note = Description of Artificial Sequence: Synthetic oligonucleotide
  misc_feature 1..20: note = Target: ANGPTL3; (-) strand; PAM type: NRG; PAM sequence: TAG
  source 1..20: mol_type = other DNA
actgtgtattttaagataaa

SEQ ID NO: 8321 - DNA, 20 bp, synthetic construct
  misc_feature 1..20: note = Description of Artificial Sequence: Synthetic oligonucleotide
  misc_feature 1..20: note = Target: ANGPTL3; (-) strand; PAM type: NRG; PAM sequence: AAG
  source 1..20: mol_type = other DNA
gaggtttgactgtgtatttt

SEQ ID NO: 8322 - DNA, 20 bp, synthetic construct
  misc_feature 1..20: note = Description of Artificial Sequence: Synthetic oligonucleotide
  misc_feature 1..20: note = Target: ANGPTL3; (-) strand; PAM type: NRG; PAM sequence: AGG
  source 1..20: mol_type = other DNA
tctattgggtgtggaaactg

SEQ ID NO: 8323 - DNA, 20 bp, synthetic construct
  misc_feature 1..20: note = Description of Artificial Sequence: Synthetic oligonucleotide
  misc_feature 1..20: note = Target: ANGPTL3; (-) strand; PAM type: NRG; PAM sequence: GAG
  source 1..20: mol_type = other DNA
atctattgggtgtggaaact

SEQ ID NO: 8324 - DNA, 20 bp, synthetic construct
  misc_feature 1..20: note = Description of Artificial Sequence: Synthetic oligonucleotide
  misc_feature 1..20: note = Target: ANGPTL3; (-) strand; PAM type: NRG; PAM sequence: TGG
  source 1..20: mol_type = other DNA
ttattcccatctattgggtg

SEQ ID NO: 8325 - DNA, 20 bp, synthetic construct
  misc_feature 1..20: note = Description of Artificial Sequence: Synthetic oligonucleotide
  misc_feature 1..20: note = Target: ANGPTL3; (-) strand; PAM type: NRG; PAM sequence: GGG
  source 1..20: mol_type = other DNA
gattattattcccatctatt

SEQ ID NO: 8326 - DNA, 20 bp, synthetic construct
  misc_feature 1..20: note = Description of Artificial Sequence: Synthetic oligonucleotide
  misc_feature 1..20: note = Target: ANGPTL3; (-) strand; PAM type: NRG; PAM sequence: TGG
  source 1..20: mol_type = other DNA
ggattattattcccatctat

SEQ ID NO: 8327 - DNA, 20 bp, synthetic construct
  misc_feature 1..20: note = Description of Artificial Sequence: Synthetic oligonucleotide
  misc_feature 1..20: note = Target: ANGPTL3; (-) strand; PAM type: NRG; PAM sequence: AGG
  source 1..20: mol_type = other DNA
gaagtattaatagatttgac

SEQ ID NO: 8328 - DNA, 20 bp, synthetic construct
  misc_feature 1..20: note = Description of Artificial Sequence: Synthetic oligonucleotide
  misc_feature 1..20: note = Target: ANGPTL3; (-) strand; PAM type: NRG; PAM sequence: CAG
  source 1..20: mol_type = other DNA
tgaagtattaatagatttga

SEQ ID NO: 8329 - DNA, 20 bp, synthetic construct
  misc_feature 1..20: note = Description of Artificial Sequence: Synthetic oligonucleotide
  misc_feature 1..20: note = Target: ANGPTL3; (-) strand; PAM type: NRG; PAM sequence: TAG
  source 1..20: mol_type = other DNA
acaatcccatgaagtattaa

SEQ ID NO: 8330 - DNA, 20 bp, synthetic construct
  misc_feature 1..20: note = Description of Artificial Sequence: Synthetic oligonucleotide
  misc_feature 1..20: note = Target: ANGPTL3; (-) strand; PAM type: NRG; PAM sequence: AAG
  source 1..20: mol_type = other DNA
ttgatgattacaatcccatg

SEQ ID NO: 8331 - DNA, 20 bp, synthetic construct
  misc_feature 1..20: note = Description of Artificial Sequence: Synthetic oligonucleotide
  misc_feature 1..20: note = Target: ANGPTL3; (-) strand; PAM type: NRG; PAM sequence: TGG
  source 1..20: mol_type = other DNA
agctattcaaatacattatc

SEQ ID NO: 8332 - DNA, 20 bp, synthetic construct
  misc_feature 1..20: note = Description of Artificial Sequence: Synthetic oligonucleotide
  misc_feature 1..20: note = Target: ANGPTL3; (-) strand; PAM type: NRG; PAM sequence: AAG
  source 1..20: mol_type = other DNA
ttagaactttatagttcata

SEQ ID NO: 8333 - DNA, 20 bp, synthetic construct
  misc_feature 1..20: note = Description of Artificial Sequence: Synthetic oligonucleotide
  misc_feature 1..20: note = Target: ANGPTL3; (-) strand; PAM type: NRG; PAM sequence: TAG
  source 1..20: mol_type = other DNA
tacatttgtttagaacttta

SEQ ID NO: 8334 - DNA, 20 bp, synthetic construct
  misc_feature 1..20: note = Description of Artificial Sequence: Synthetic oligonucleotide
  misc_feature 1..20: note = Target: ANGPTL3; (-) strand; PAM type: NRG; PAM sequence: TAG
  source 1..20: mol_type = other DNA
aaaaagtatatacatttgtt

SEQ ID NO: 8335 - DNA, 20 bp, synthetic construct
  misc_feature 1..20: note = Description of Artificial Sequence: Synthetic oligonucleotide
  misc_feature 1..20: note = Target: ANGPTL3; (-) strand; PAM type: NRG; PAM sequence: AAG
  source 1..20: mol_type = other DNA
cggaagaacctgtttttaaa

SEQ ID NO: 8336 - DNA, 20 bp, synthetic construct
  misc_feature 1..20: note = Description of Artificial Sequence: Synthetic oligonucleotide
  misc_feature 1..20: note = Target: ANGPTL3; (-) strand; PAM type: NRG; PAM sequence: AAG
  source 1..20: mol_type = other DNA
gaatgtgaaaaatgacacgg

SEQ ID NO: 8337 - DNA, 20 bp, synthetic construct
  misc_feature 1..20: note = Description of Artificial Sequence: Synthetic oligonucleotide
  misc_feature 1..20: note = Target: ANGPTL3; (-) strand; PAM type: NRG; PAM sequence: CGG
  source 1..20: mol_type = other DNA
aaggaatgtgaaaaatgaca

SEQ ID NO: 8338 - DNA, 20 bp, synthetic construct
  misc_feature 1..20: note = Description of Artificial Sequence: Synthetic oligonucleotide
  misc_feature 1..20: note = Target: ANGPTL3; (-) strand; PAM type: NRG; PAM sequence: AGG
  source 1..20: mol_type = other DNA
tgtagagattatttacttaa

SEQ ID NO: 8339 - DNA, 20 bp, synthetic construct
  misc_feature 1..20: note = Description of Artificial Sequence: Synthetic oligonucleotide
  misc_feature 1..20: note = Target: ANGPTL3; (-) strand; PAM type: NRG; PAM sequence: AAG
  source 1..20: mol_type = other DNA
ttgtagagattatttactta

SEQ ID NO: 8340 - DNA, 20 bp, synthetic construct
  misc_feature 1..20: note = Description of Artificial Sequence: Synthetic oligonucleotide
  misc_feature 1..20: note = Target: ANGPTL3; (-) strand; PAM type: NRG; PAM sequence: GAG
  source 1..20: mol_type = other DNA
tcagttaggaagcgtttgta

SEQ ID NO: 8341 - DNA, 20 bp, synthetic construct
  misc_feature 1..20: note = Description of Artificial Sequence: Synthetic oligonucleotide
  misc_feature 1..20: note = Target: ANGPTL3; (-) strand; PAM type: NRG; PAM sequence: TAG
  source 1..20: mol_type = other DNA
gttcagttaggaagcgtttg

SEQ ID NO: 8342 - DNA, 20 bp, synthetic construct
  misc_feature 1..20: note = Description of Artificial Sequence: Synthetic oligonucleotide
  misc_feature 1..20: note = Target: ANGPTL3; (-) strand; PAM type: NRG; PAM sequence: AAG
  source 1..20: mol_type = other DNA
ttataatatgttcagttagg

SEQ ID NO: 8343 - DNA, 20 bp, synthetic construct
  misc_feature 1..20: note = Description of Artificial Sequence: Synthetic oligonucleotide
  misc_feature 1..20: note = Target: ANGPTL3; (-) strand; PAM type: NRG; PAM sequence: AGG
  source 1..20: mol_type = other DNA
gaattataatatgttcagtt

SEQ ID NO: 8344 - DNA, 20 bp, synthetic construct
  misc_feature 1..20: note = Description of Artificial Sequence: Synthetic oligonucleotide
  misc_feature 1..20: note = Target: ANGPTL3; (-) strand; PAM type: NRG; PAM sequence: TAG
  source 1..20: mol_type = other DNA
agaattataatatgttcagt

SEQ ID NO: 8345 - DNA, 20 bp, synthetic construct
  misc_feature 1..20: note = Description of Artificial Sequence: Synthetic oligonucleotide
  misc_feature 1..20: note = Target: ANGPTL3; (-) strand; PAM type: NRG; PAM sequence: CAG
  source 1..20: mol_type = other DNA
cctgagaattataatatgtt

SEQ ID NO: 8346 - DNA, 20 bp, synthetic construct
  misc_feature 1..20: note = Description of Artificial Sequence: Synthetic oligonucleotide
  misc_feature 1..20: note = Target: ANGPTL3; (-) strand; PAM type: NRG; PAM sequence: GAG
  source 1..20: mol_type = other DNA
cagttttgttcttctgtcct

SEQ ID NO: 8347 - DNA, 20 bp, synthetic construct
  misc_feature 1..20: note = Description of Artificial Sequence: Synthetic oligonucleotide
  misc_feature 1..20: note = Target: ANGPTL3; (-) strand; PAM type: NRG; PAM sequence: CAG
  source 1..20: mol_type = other DNA
gatgcaaactctgagaaggg

SEQ ID NO: 8348 - DNA, 20 bp, synthetic construct
  misc_feature 1..20: note = Description of Artificial Sequence: Synthetic oligonucleotide
  misc_feature 1..20: note = Target: ANGPTL3; (-) strand; PAM type: NRG; PAM sequence: GGG
  source 1..20: mol_type = other DNA
acagatgcaaactctgagaa

SEQ ID NO: 8349 - DNA, 20 bp, synthetic construct
  misc_feature 1..20: note = Description of Artificial Sequence: Synthetic oligonucleotide
  misc_feature 1..20: note = Target: ANGPTL3; (-) strand; PAM type: NRG; PAM sequence: AGG
  source 1..20: mol_type = other DNA
aacagatgcaaactctgaga

SEQ ID NO: 8350 - DNA, 20 bp, synthetic construct
  misc_feature 1..20: note = Description of Artificial Sequence: Synthetic oligonucleotide
  misc_feature 1..20: note = Target: ANGPTL3; (-) strand; PAM type: NRG; PAM sequence: AAG
  source 1..20: mol_type = other DNA
aaacagatgcaaactctgag

SEQ ID NO: 8351 - DNA, 20 bp, synthetic construct
  misc_feature 1..20: note = Description of Artificial Sequence: Synthetic oligonucleotide
  misc_feature 1..20: note = Target: ANGPTL3; (-) strand; PAM type: NRG; PAM sequence: GAG
  source 1..20: mol_type = other DNA
cagaaacagatgcaaactct

SEQ ID NO: 8352 - DNA, 20 bp, synthetic construct
  misc_feature 1..20: note = Description of Artificial Sequence: Synthetic oligonucleotide
  misc_feature 1..20: note = Target: ANGPTL3; (-) strand; PAM type: NRG; PAM sequence: CAG
  source 1..20: mol_type = other DNA
aaggagtaaagttccagaaa

SEQ ID NO: 8353 - DNA, 20 bp, synthetic construct
  misc_feature 1..20: note = Description of Artificial Sequence: Synthetic oligonucleotide
  misc_feature 1..20: note = Target: ANGPTL3; (-) strand; PAM type: NRG; PAM sequence: CAG
  source 1..20: mol_type = other DNA
gaagggaaggagtaaagttc

SEQ ID NO: 8354 - DNA, 20 bp, synthetic construct
  misc_feature 1..20: note = Description of Artificial Sequence: Synthetic oligonucleotide
  misc_feature 1..20: note = Target: ANGPTL3; (-) strand; PAM type: NRG; PAM sequence: AAG
  source 1..20: mol_type = other DNA
gattgtgaagggaaggagta

SEQ ID NO: 8355 - DNA, 20 bp, synthetic construct
  misc_feature 1..20: note = Description of Artificial Sequence: Synthetic oligonucleotide
  misc_feature 1..20: note = Target: ANGPTL3; (-) strand; PAM type: NRG; PAM sequence: GAG
  source 1..20: mol_type = other DNA
tcttagattgtgaagggaag

SEQ ID NO: 8356 - DNA, 20 bp, synthetic construct
  misc_feature 1..20: note = Description of Artificial Sequence: Synthetic oligonucleotide
  misc_feature 1..20: note = Target: ANGPTL3; (-) strand; PAM type: NRG; PAM sequence: AGG
  source 1..20: mol_type = other DNA
tatcttagattgtgaaggga

SEQ ID NO: 8357 - DNA, 20 bp, synthetic construct
  misc_feature 1..20: note = Description of Artificial Sequence: Synthetic oligonucleotide
  misc_feature 1..20: note = Target: ANGPTL3; (-) strand; PAM type: NRG; PAM sequence: AAG
  source 1..20: mol_type = other DNA
ttatcttagattgtgaaggg

SEQ ID NO: 8358 - DNA, 20 bp, synthetic construct
  misc_feature 1..20: note = Description of Artificial Sequence: Synthetic oligonucleotide
  misc_feature 1..20: note = Target: ANGPTL3; (-) strand; PAM type: NRG; PAM sequence: GGG
  source 1..20: mol_type = other DNA
gtgttatcttagattgtgaa

SEQ ID NO: 8359 - DNA, 20 bp, synthetic construct
  misc_feature 1..20: note = Description of Artificial Sequence: Synthetic oligonucleotide
  misc_feature 1..20: note = Target: ANGPTL3; (-) strand; PAM type: NRG; PAM sequence: AGG
  source 1..20: mol_type = other DNA
agtgttatcttagattgtga

SEQ ID NO: 8360 - DNA, 20 bp, synthetic construct
  misc_feature 1..20: note = Description of Artificial Sequence: Synthetic oligonucleotide
  misc_feature 1..20: note = Target: ANGPTL3; (-) strand; PAM type: NRG; PAM sequence: AAG
  source 1..20: mol_type = other DNA
gagtgttatcttagattgtg

SEQ ID NO: 8361 - DNA, 20 bp, synthetic construct
  misc_feature 1..20: note = Description of Artificial Sequence: Synthetic oligonucleotide
  misc_feature 1..20: note = Target: ANGPTL3; (-) strand; PAM type: NRG; PAM sequence: TAG
  source 1..20: mol_type = other DNA
aaggtgatggagtgttatct

SEQ ID NO: 8362 - DNA, 20 bp, synthetic construct
  misc_feature 1..20: note = Description of Artificial Sequence: Synthetic oligonucleotide
  misc_feature 1..20: note = Target: ANGPTL3; (-) strand; PAM type: NRG; PAM sequence: GAG
  source 1..20: mol_type = other DNA
gcttgcatctgaaggtgatg

SEQ ID NO: 8363 - DNA, 20 bp, synthetic construct
  misc_feature 1..20: note = Description of Artificial Sequence: Synthetic oligonucleotide
  misc_feature 1..20: note = Target: ANGPTL3; (-) strand; PAM type: NRG; PAM sequence: TGG
  source 1..20: mol_type = other DNA
gggcttgcatctgaaggtga

SEQ ID NO: 8364 - DNA, 20 bp, synthetic construct
  misc_feature 1..20: note = Description of Artificial Sequence: Synthetic oligonucleotide
  misc_feature 1..20: note = Target: ANGPTL3; (-) strand; PAM type: NRG; PAM sequence: AGG
  source 1..20: mol_type = other DNA
agttaggggcttgcatctga

SEQ ID NO: 8365 - DNA, 20 bp, synthetic construct
  misc_feature 1..20: note = Description of Artificial Sequence: Synthetic oligonucleotide
  misc_feature 1..20: note = Target: ANGPTL3; (-) strand; PAM type: NRG; PAM sequence: AAG
  source 1..20: mol_type = other DNA
tagttaggggcttgcatctg

SEQ ID NO: 8366 - DNA, 20 bp, synthetic construct
  misc_feature 1..20: note = Description of Artificial Sequence: Synthetic oligonucleotide
  misc_feature 1..20: note = Target: ANGPTL3; (-) strand; PAM type: NRG; PAM sequence: GGG
  source 1..20: mol_type = other DNA
acccagaagtttttagttag

SEQ ID NO: 8367 - DNA, 20 bp, synthetic construct
  misc_feature 1..20: note = Description of Artificial Sequence: Synthetic oligonucleotide
  misc_feature 1..20: note = Target: ANGPTL3; (-) strand; PAM type: NRG; PAM sequence: GGG
  source 1..20: mol_type = other DNA
cacccagaagtttttagtta

SEQ ID NO: 8368 - DNA, 20 bp, synthetic construct
  misc_feature 1..20: note = Description of Artificial Sequence: Synthetic oligonucleotide
  misc_feature 1..20: note = Target: ANGPTL3; (-) strand; PAM type: NRG; PAM sequence: AGG
  source 1..20: mol_type = other DNA
ccacccagaagtttttagtt

SEQ ID NO: 8369 - DNA, 20 bp, synthetic construct
  misc_feature 1..20: note = Description of Artificial Sequence: Synthetic oligonucleotide
  misc_feature 1..20: note = Target: ANGPTL3; (-) strand; PAM type: NRG; PAM sequence: TAG
  source 1..20: mol_type = other DNA
gccacccagaagtttttagt

SEQ ID NO: 8370 - DNA, 20 bp, synthetic construct
  misc_feature 1..20: note = Description of Artificial Sequence: Synthetic oligonucleotide
  misc_feature 1..20: note = Target: ANGPTL3; (-) strand; PAM type: NRG; PAM sequence: TAG
  source 1..20: mol_type = other DNA
catagccacccagaagtttt

SEQ ID NO: 8371 - DNA, 20 bp, synthetic construct
  misc_feature 1..20: note = Description of Artificial Sequence: Synthetic oligonucleotide
  misc_feature 1..20: note = Target: ANGPTL3; (-) strand; PAM type: NRG; PAM sequence: AAG
  source 1..20: mol_type = other DNA
attttaacatagccacccag

SEQ ID NO: 8372 - DNA, 20 bp, synthetic construct
  misc_feature 1..20: note = Description of Artificial Sequence: Synthetic oligonucleotide
  misc_feature 1..20: note = Target: ANGPTL3; (-) strand; PAM type: NRG; PAM sequence: CAG
  source 1..20: mol_type = other DNA
aacattttaacatagccacc

SEQ ID NO: 8373 - DNA, 20 bp, synthetic construct
  misc_feature 1..20: note = Description of Artificial Sequence: Synthetic oligonucleotide
  misc_feature 1..20: note = Target: ANGPTL3; (-) strand; PAM type: NRG; PAM sequence: TAG
  source 1..20: mol_type = other DNA
tatttcctaacattttaaca

SEQ ID NO: 8374 - DNA, 20 bp, synthetic construct
  misc_feature 1..20: note = Description of Artificial Sequence: Synthetic oligonucleotide
  misc_feature 1..20: note = Target: ANGPTL3; (-) strand; PAM type: NRG; PAM sequence: GAG
  source 1..20: mol_type = other DNA
aaaaaagaattctgagtcaa

SEQ ID NO: 8375 - DNA, 20 bp, synthetic construct
  misc_feature 1..20: note = Description of Artificial Sequence: Synthetic oligonucleotide
  misc_feature 1..20: note = Target: ANGPTL3; (-) strand; PAM type: NRG; PAM sequence: AAG
  source 1..20: mol_type = other DNA
aaaaaaaagaattctgagtc

SEQ ID NO: 8376 - DNA, 20 bp, synthetic construct
  misc_feature 1..20: note = Description of Artificial Sequence: Synthetic oligonucleotide
  misc_feature 1..20: note = Target: ANGPTL3; (-) strand; PAM type: NRG; PAM sequence: GAG
  source 1..20: mol_type = other DNA
tcgaaaaaaaaaagaattct

SEQ ID NO: 8377 - DNA, 20 bp, synthetic construct
  misc_feature 1..20: note = Description of Artificial Sequence: Synthetic oligonucleotide
  misc_feature 1..20: note = Target: ANGPTL3; (-) strand; PAM type: NRG; PAM sequence: AAG
  source 1..20: mol_type = other DNA
gactccatctcgaaaaaaaa

SEQ ID NO: 8378 - DNA, 20 bp, synthetic construct
  misc_feature 1..20: note = Description of Artificial Sequence: Synthetic oligonucleotide
  misc_feature 1..20: note = Target: ANGPTL3; (-) strand; PAM type: NRG; PAM sequence: GAG
  source 1..20: mol_type = other DNA
tccagcctgggtgacagagc

SEQ ID NO: 8379 - DNA, 20 bp, synthetic construct
  misc_feature 1..20: note = Description of Artificial Sequence: Synthetic oligonucleotide
  misc_feature 1..20: note = Target: ANGPTL3; (-) strand; PAM type: NRG; PAM sequence: GAG
  source 1..20: mol_type = other DNA
gcactccagcctgggtgaca

SEQ ID NO: 8380 - DNA, 20 bp, synthetic construct
  misc_feature 1..20: note = Description of Artificial Sequence: Synthetic oligonucleotide
  misc_feature 1..20: note = Target: ANGPTL3; (-) strand; PAM type: NRG; PAM sequence: CAG
  source 1..20: mol_type = other DNA
ctgcactccagcctgggtga

SEQ ID NO: 8381 - DNA, 20 bp, synthetic construct
  misc_feature 1..20: note = Description of Artificial Sequence: Synthetic oligonucleotide
  misc_feature 1..20: note = Target: ANGPTL3; (-) strand; PAM type: NRG; PAM sequence: GGG
  source 1..20: mol_type = other DNA
gtgccactgcactccagcct

SEQ ID NO: 8382 - DNA, 20 bp, synthetic construct
  misc_feature 1..20: note = Description of Artificial Sequence: Synthetic oligonucleotide
  misc_feature 1..20: note = Target: ANGPTL3; (-) strand; PAM type: NRG; PAM sequence: TGG
  source 1..20: mol_type = other DNA
agtgccactgcactccagcc

SEQ ID NO: 8383 - DNA, 20 bp, synthetic construct
  misc_feature 1..20: note = Description of Artificial Sequence: Synthetic oligonucleotide
  misc_feature 1..20: note = Target: ANGPTL3; (-) strand; PAM type: NRG; PAM sequence: CAG
  source 1..20: mol_type = other DNA
tgtgcagtgccactgcactc

SEQ ID NO: 8384 - DNA, 20 bp, synthetic construct
  misc_feature 1..20: note = Description of Artificial Sequence: Synthetic oligonucleotide
  misc_feature 1..20: note = Target: ANGPTL3; (-) strand; PAM type: NRG; PAM sequence: CAG
  source 1..20: mol_type = other DNA
agatcactcagctcactgtg

SEQ ID NO: 8385 - DNA, 20 bp, synthetic construct
  misc_feature 1..20: note = Description of Artificial Sequence: Synthetic oligonucleotide
  misc_feature 1..20: note = Target: ANGPTL3; (-) strand; PAM type: NRG; PAM sequence: CAG
  source 1..20: mol_type = other DNA
tgcagagagctgagatcact

SEQ ID NO: 8386 - DNA, 20 bp, synthetic construct
  misc_feature 1..20: note = Description of Artificial Sequence: Synthetic oligonucleotide
  misc_feature 1..20: note = Target: ANGPTL3; (-) strand; PAM type: NRG; PAM sequence: GAG
  source 1..20: mol_type = other DNA
ggcggaggttgcagagagct

SEQ ID NO: 8387 - DNA, 20 bp, synthetic construct
  misc_feature 1..20: note = Description of Artificial Sequence: Synthetic oligonucleotide
  misc_feature 1..20: note = Target: ANGPTL3; (-) strand; PAM type: NRG; PAM sequence: GAG
  source 1..20: mol_type = other DNA
caggaggcggaggttgcaga

SEQ ID NO: 8388 - DNA, 20 bp, synthetic construct
  misc_feature 1..20: note = Description of Artificial Sequence: Synthetic oligonucleotide
  misc_feature 1..20: note = Target: ANGPTL3; (-) strand; PAM type: NRG; PAM sequence: GAG
  source 1..20: mol_type = other DNA
cccaggaggcggaggttgca

SEQ ID NO: 8389 - DNA, 20 bp, synthetic construct
  misc_feature 1..20: note = Description of Artificial Sequence: Synthetic oligonucleotide
  misc_feature 1..20: note = Target: ANGPTL3; (-) strand; PAM type: NRG; PAM sequence: CAG
  source 1..20: mol_type = other DNA
aacccaggaggcggaggttg

SEQ ID NO: 8390 - DNA, 20 bp, synthetic construct
  misc_feature 1..20: note = Description of Artificial Sequence: Synthetic oligonucleotide
  misc_feature 1..20: note = Target: ANGPTL3; (-) strand; PAM type: NRG; PAM sequence: AGG
  source 1..20: mol_type = other DNA
cacttgaacccaggaggcgg

SEQ ID NO: 8391 - DNA, 20 bp, synthetic construct
  misc_feature 1..20: note = Description of Artificial Sequence: Synthetic oligonucleotide
  misc_feature 1..20: note = Target: ANGPTL3; (-) strand; PAM type: NRG; PAM sequence: GAG
  source 1..20: mol_type = other DNA
tcacttgaacccaggaggcg

SEQ ID NO: 8392 - DNA, 20 bp, synthetic construct
  misc_feature 1..20: note = Description of Artificial Sequence: Synthetic oligonucleotide
  misc_feature 1..20: note = Target: ANGPTL3; (-) strand; PAM type: NRG; PAM sequence: CGG
  source 1..20: mol_type = other DNA
aatcacttgaacccaggagg

SEQ ID NO: 8393 - DNA, 20 bp, synthetic construct
  misc_feature 1..20: note = Description of Artificial Sequence: Synthetic oligonucleotide
  misc_feature 1..20: note = Target: ANGPTL3; (-) strand; PAM type: NRG; PAM sequence: AGG
  source 1..20: mol_type = other DNA
gagaatcacttgaacccagg

SEQ ID NO: 8394 - DNA, 20 bp, synthetic construct
  misc_feature 1..20: note = Description of Artificial Sequence: Synthetic oligonucleotide
  misc_feature 1..20: note = Target: ANGPTL3; (-) strand; PAM type: NRG; PAM sequence: GAG
  source 1..20: mol_type = other DNA
ggagaatcacttgaacccag

SEQ ID NO: 8395 - DNA, 20 bp, synthetic construct
  misc_feature 1..20: note = Description of Artificial Sequence: Synthetic oligonucleotide
  misc_feature 1..20: note = Target: ANGPTL3; (-) strand; PAM type: NRG; PAM sequence: AGG
  source 1..20: mol_type = other DNA
caggagaatcacttgaaccc

SEQ ID NO: 8396 - DNA, 20 bp, synthetic construct
  misc_feature 1..20: note = Description of Artificial Sequence: Synthetic oligonucleotide
  misc_feature 1..20: note = Target: ANGPTL3; (-) strand; PAM type: NRG; PAM sequence: CAG
  source 1..20: mol_type = other DNA
gcaggagaatcacttgaacc

SEQ ID NO: 8397 - DNA, 20 bp, synthetic construct
  misc_feature 1..20: note = Description of Artificial Sequence: Synthetic oligonucleotide
  misc_feature 1..20: note = Target: ANGPTL3; (-) strand; PAM type: NRG; PAM sequence: GAG
  source 1..20: mol_type = other DNA
tactcaggagtctgaggcag

SEQ ID NO: 8398 - DNA, 20 bp, synthetic construct
  misc_feature 1..20: note = Description of Artificial Sequence: Synthetic oligonucleotide
  misc_feature 1..20: note = Target: ANGPTL3; (-) strand; PAM type: NRG; PAM sequence: AGG
  source 1..20: mol_type = other DNA
gctactcaggagtctgaggc

SEQ ID NO: 8399 - DNA, 20 bp, synthetic construct
  misc_feature 1..20: note = Description of Artificial Sequence: Synthetic oligonucleotide
  misc_feature 1..20: note = Target: ANGPTL3; (-) strand; PAM type: NRG; PAM sequence: CAG
  source 1..20: mol_type = other DNA
agctactcaggagtctgagg

SEQ ID NO: 8400 - DNA, 20 bp, synthetic construct
  misc_feature 1..20: note = Description of Artificial Sequence: Synthetic oligonucleotide
  misc_feature 1..20: note = Target: ANGPTL3; (-) strand; PAM type: NRG; PAM sequence: AGG
  source 1..20: mol_type = other DNA
cctagctactcaggagtctg

SEQ ID NO: 8401 - DNA, 20 bp, synthetic construct
  misc_feature 1..20: note = Description of Artificial Sequence: Synthetic oligonucleotide
  misc_feature 1..20: note = Target: ANGPTL3; (-) strand; PAM type: NRG; PAM sequence: GAG
  source 1..20: mol_type = other DNA
tcctagctactcaggagtct

SEQ ID NO: 8402 - DNA, 20 bp, synthetic construct
  misc_feature 1..20: note = Description of Artificial Sequence: Synthetic oligonucleotide
  misc_feature 1..20: note = Target: ANGPTL3; (-) strand; PAM type: NRG; PAM sequence: GAG
  source 1..20: mol_type = other DNA
ctgtaatcctagctactcag

SEQ ID NO: 8403 - DNA, 20 bp, synthetic construct
  misc_feature 1..20: note = Description of Artificial Sequence: Synthetic oligonucleotide
  misc_feature 1..20: note = Target: ANGPTL3; (-) strand; PAM type: NRG; PAM sequence: AGG
  source 1..20: mol_type = other DNA
acctgtaatcctagctactc

SEQ ID NO: 8404 - DNA, 20 bp, synthetic construct
  misc_feature 1..20: note = Description of Artificial Sequence: Synthetic oligonucleotide
  misc_feature 1..20: note = Target: ANGPTL3; (-) strand; PAM type: NRG; PAM sequence: CAG
  source 1..20: mol_type = other DNA
tacctgtaatcctagctact

SEQ ID NO: 8405 - DNA, 20 bp, synthetic construct
  misc_feature 1..20: note = Description of Artificial Sequence: Synthetic oligonucleotide
  misc_feature 1..20: note = Target: ANGPTL3; (-) strand; PAM type: NRG; PAM sequence: TAG
  source 1..20: mol_type = other DNA
gtggcacatacctgtaatcc

SEQ ID NO: 8406 - DNA, 20 bp, synthetic construct
  misc_feature 1..20: note = Description of Artificial Sequence: Synthetic oligonucleotide
  misc_feature 1..20: note = Target: ANGPTL3; (-) strand; PAM type: NRG; PAM sequence: TGG
  source 1..20: mol_type = other DNA
caaaaattagccaggcatgg

SEQ ID NO: 8407 - DNA, 20 bp, synthetic construct
  misc_feature 1..20: note = Description of Artificial Sequence: Synthetic oligonucleotide
  misc_feature 1..20: note = Target: ANGPTL3; (-) strand; PAM type: NRG; PAM sequence: TGG
  source 1..20: mol_type = other DNA
atacaaaaattagccaggca

SEQ ID NO: 8408 - DNA, 20 bp, synthetic construct
  misc_feature 1..20: note = Description of Artificial Sequence: Synthetic oligonucleotide
  misc_feature 1..20: note = Target: ANGPTL3; (-) strand; PAM type: NRG; PAM sequence: AGG
  source 1..20: mol_type = other DNA
taaaaatacaaaaattagcc

SEQ ID NO: 8409 - DNA, 20 bp, synthetic construct
  misc_feature 1..20: note = Description of Artificial Sequence: Synthetic oligonucleotide
  misc_feature 1..20: note = Target: ANGPTL3; (-) strand; PAM type: NRG; PAM sequence: CAG
  source 1..20: mol_type = other DNA
ctaaaaatacaaaaattagc

SEQ ID NO: 8410 - DNA, 20 bp, synthetic construct
  misc_feature 1..20: note = Description of Artificial Sequence: Synthetic oligonucleotide
  misc_feature 1..20: note = Target: ANGPTL3; (-) strand; PAM type: NRG; PAM sequence: TAG
  source 1..20: mol_type = other DNA
tctactaaaaatacaaaaat

SEQ ID NO: 8411 - DNA, 20 bp, synthetic construct
  misc_feature 1..20: note = Description of Artificial Sequence: Synthetic oligonucleotide
  misc_feature 1..20: note = Target: ANGPTL3; (-) strand; PAM type: NRG; PAM sequence: CAG
  source 1..20: mol_type = other DNA
cgaggtcaggagttcgggac

SEQ ID NO: 8412 - DNA, 20 bp, synthetic construct
  misc_feature 1..20: note = Description of Artificial Sequence: Synthetic oligonucleotide
  misc_feature 1..20: note = Target: ANGPTL3; (-) strand; PAM type: NRG; PAM sequence: GGG
  source 1..20: mol_type = other DNA
gatcacgaggtcaggagttc

SEQ ID NO: 8413 - DNA, 20 bp, synthetic construct
  misc_feature 1..20: note = Description of Artificial Sequence: Synthetic oligonucleotide
  misc_feature 1..20: note = Target: ANGPTL3; (-) strand; PAM type: NRG; PAM sequence: CGG
  source 1..20: mol_type = other DNA
ggatcacgaggtcaggagtt

SEQ ID NO: 8414 - DNA, 20 bp, synthetic construct
  misc_feature 1..20: note = Description of Artificial Sequence: Synthetic oligonucleotide
  misc_feature 1..20: note = Target: ANGPTL3; (-) strand; PAM type: NRG; PAM sequence: GAG
  source 1..20: mol_type = other DNA
aaggcggatcacgaggtcag

SEQ ID NO: 8415 - DNA, 20 bp, synthetic construct
  misc_feature 1..20: note = Description of Artificial Sequence: Synthetic oligonucleotide
  misc_feature 1..20: note = Target: ANGPTL3; (-) strand; PAM type: NRG; PAM sequence: AGG
  source 1..20: mol_type = other DNA
ggaaggcggatcacgaggtc

SEQ ID NO: 8416 - DNA, 20 bp, synthetic construct
  misc_feature 1..20: note = Description of Artificial Sequence: Synthetic oligonucleotide
  misc_feature 1..20: note = Target: ANGPTL3; (-) strand; PAM type: NRG; PAM sequence: CAG
  source 1..20: mol_type = other DNA
aggaaggcggatcacgaggt

SEQ ID NO: 8417 - DNA, 20 bp, synthetic construct
  misc_feature 1..20: note = Description of Artificial Sequence: Synthetic oligonucleotide
  misc_feature 1..20: note = Target: ANGPTL3; (-) strand; PAM type: NRG; PAM sequence: AGG
  source 1..20: mol_type = other DNA
gccgaggaaggcggatcacg

SEQ ID NO: 8418 - DNA, 20 bp, synthetic construct
  misc_feature 1..20: note = Description of Artificial Sequence: Synthetic oligonucleotide
  misc_feature 1..20: note = Target: ANGPTL3; (-) strand; PAM type: NRG; PAM sequence: GAG
  source 1..20: mol_type = other DNA
ggccgaggaaggcggatcac

SEQ ID NO: 8419 - DNA, 20 bp, synthetic construct
  misc_feature 1..20: note = Description of Artificial Sequence: Synthetic oligonucleotide
  misc_feature 1..20: note = Target: ANGPTL3; (-) strand; PAM type: NRG; PAM sequence: CGG
  source 1..20: mol_type = other DNA
ctttgggaggccgaggaagg

SEQ ID NO: 8420 - DNA, 20 bp, synthetic construct
  misc_feature 1..20: note = Description of Artificial Sequence: Synthetic oligonucleotide
  misc_feature 1..20: note = Target: ANGPTL3; (-) strand; PAM type: NRG; PAM sequence: AGG
  source 1..20: mol_type = other DNA
gcactttgggaggccgagga

SEQ ID NO: 8421 - DNA, 20 bp, synthetic construct
  misc_feature 1..20: note = Description of Artificial Sequence: Synthetic oligonucleotide
  misc_feature 1..20: note = Target: ANGPTL3; (-) strand; PAM type: NRG; PAM sequence: AAG
  source 1..20: mol_type = other DNA
agcactttgggaggccgagg

SEQ ID NO: 8422 - DNA, 20 bp, synthetic construct
  misc_feature 1..20: note = Description of Artificial Sequence: Synthetic oligonucleotide
  misc_feature 1..20: note = Target: ANGPTL3; (-) strand; PAM type: NRG; PAM sequence: AGG
  source 1..20: mol_type = other DNA
cttagcactttgggaggccg

SEQ ID NO: 8423 - DNA, 20 bp, synthetic construct
  misc_feature 1..20: note = Description of Artificial Sequence: Synthetic oligonucleotide
  misc_feature 1..20: note = Target: ANGPTL3; (-) strand; PAM type: NRG; PAM sequence: GAG
  source 1..20: mol_type = other DNA
tcttagcactttgggaggcc

SEQ ID NO: 8424 - DNA, 20 bp, synthetic construct
  misc_feature 1..20: note = Description of Artificial Sequence: Synthetic oligonucleotide
  misc_feature 1..20: note = Target: ANGPTL3; (-) strand; PAM type: NRG; PAM sequence: AGG
  source 1..20: mol_type = other DNA
tgtaatcttagcactttggg

SEQ ID NO: 8425 - DNA, 20 bp, synthetic construct
  misc_feature 1..20: note = Description of Artificial Sequence: Synthetic oligonucleotide
  misc_feature 1..20: note = Target: ANGPTL3; (-) strand; PAM type: NRG; PAM sequence: GAG
  source 1..20: mol_type = other DNA
ctgtaatcttagcactttgg

SEQ ID NO: 8426 - DNA, 20 bp, synthetic construct
  misc_feature 1..20: note = Description of Artificial Sequence: Synthetic oligonucleotide
  misc_feature 1..20: note = Target: ANGPTL3; (-) strand; PAM type: NRG; PAM sequence: GGG
  source 1..20: mol_type = other DNA
gcctgtaatcttagcacttt

SEQ ID NO: 8427 - DNA, 20 bp, synthetic construct
  misc_feature 1..20: note = Description of Artificial Sequence: Synthetic oligonucleotide
  misc_feature 1..20: note = Target: ANGPTL3; (-) strand; PAM type: NRG; PAM sequence: TGG
  source 1..20: mol_type = other DNA
cgcctgtaatcttagcactt

SEQ ID NO: 8428 - DNA, 20 bp, synthetic construct
  misc_feature 1..20: note = Description of Artificial Sequence: Synthetic oligonucleotide
  misc_feature 1..20: note = Target: ANGPTL3; (-) strand; PAM type: NRG; PAM sequence: TAG
  source 1..20: mol_type = other DNA
ggggctcacgcctgtaatct

SEQ ID NO: 8429 - DNA, 20 bp, synthetic construct
  misc_feature 1..20: note = Description of Artificial Sequence: Synthetic oligonucleotide
  misc_feature 1..20: note = Target: ANGPTL3; (-) strand; PAM type: NRG; PAM sequence: GGG
  source 1..20: mol_type = other DNA
actgagtcggctgggcgcgg

SEQ ID NO: 8430 - DNA, 20 bp, synthetic construct
  misc_feature 1..20: note = Description of Artificial Sequence: Synthetic oligonucleotide
  misc_feature 1..20: note = Target: ANGPTL3; (-) strand; PAM type: NRG; PAM sequence: GGG
  source 1..20: mol_type = other DNA
aactgagtcggctgggcgcg

SEQ ID NO: 8431 - DNA, 20 bp, synthetic construct
  misc_feature 1..20: note = Description of Artificial Sequence: Synthetic oligonucleotide
  misc_feature 1..20: note = Target: ANGPTL3; (-) strand; PAM type: NRG; PAM sequence: GGG
  source 1..20: mol_type = other DNA
aaactgagtcggctgggcgc

SEQ ID NO: 8432 - DNA, 20 bp, synthetic construct
  misc_feature 1..20: note = Description of Artificial Sequence: Synthetic oligonucleotide
  misc_feature 1..20: note = Target: ANGPTL3; (-) strand; PAM type: NRG; PAM sequence: CGG
  source 1..20: mol_type = other DNA
aaaactgagtcggctgggcg

SEQ ID NO: 8433 - DNA, 20 bp, synthetic construct
  misc_feature 1..20: note = Description of Artificial Sequence: Synthetic oligonucleotide
  misc_feature 1..20: note = Target: ANGPTL3; (-) strand; PAM type: NRG; PAM sequence: GGG
  source 1..20: mol_type = other DNA
ctataaaaactgagtcggct

SEQ ID NO: 8434 - DNA, 20 bp, synthetic construct
  misc_feature 1..20: note = Description of Artificial Sequence: Synthetic oligonucleotide
  misc_feature 1..20: note = Target: ANGPTL3; (-) strand; PAM type: NRG; PAM sequence: TGG
  source 1..20: mol_type = other DNA
actataaaaactgagtcggc

SEQ ID NO: 8435 - DNA, 20 bp, synthetic construct
  misc_feature 1..20: note = Description of Artificial Sequence: Synthetic oligonucleotide
  misc_feature 1..20: note = Target: ANGPTL3; (-) strand; PAM type: NRG; PAM sequence: CGG
  source 1..20: mol_type = other DNA
tttaactataaaaactgagt

SEQ ID NO: 8436 - DNA, 20 bp, synthetic construct
  misc_feature 1..20: note = Description of Artificial Sequence: Synthetic oligonucleotide
  misc_feature 1..20: note = Target: ANGPTL3; (-) strand; PAM type: NRG; PAM sequence: GAG
  source 1..20: mol_type = other DNA
ttattttaactataaaaact

SEQ ID NO: 8437 - DNA, 20 bp, synthetic construct
  misc_feature 1..20: note = Description of Artificial Sequence: Synthetic oligonucleotide
  misc_feature 1..20: note = Target: ANGPTL3; (-) strand; PAM type: NRG; PAM sequence: TAG
  source 1..20: mol_type = other DNA
ttattctatcgaattggtcc

SEQ ID NO: 8438 - DNA, 20 bp, synthetic construct
  misc_feature 1..20: note = Description of Artificial Sequence: Synthetic oligonucleotide
  misc_feature 1..20: note = Target: ANGPTL3; (-) strand; PAM type: NRG; PAM sequence: TGG
  source 1..20: mol_type = other DNA
tgagttttattctatcgaat

SEQ ID NO: 8439 - DNA, 20 bp, synthetic construct
  misc_feature 1..20: note = Description of Artificial Sequence: Synthetic oligonucleotide
  misc_feature 1..20: note = Target: ANGPTL3; (-) strand; PAM type: NRG; PAM sequence: GAG
  source 1..20: mol_type = other DNA
tgtccttgttataccactct

SEQ ID NO: 8440 - DNA, 20 bp, synthetic construct
  misc_feature 1..20: note = Description of Artificial Sequence: Synthetic oligonucleotide
  misc_feature 1..20: note = Target: ANGPTL3; (-) strand; PAM type: NRG; PAM sequence: TGG
  source 1..20: mol_type = other DNA
tgccacatactctgctattt

SEQ ID NO: 8441 - DNA, 20 bp, synthetic construct
  misc_feature 1..20: note = Description of Artificial Sequence: Synthetic oligonucleotide
  misc_feature 1..20: note = Target: ANGPTL3; (-) strand; PAM type: NRG; PAM sequence: AAG
  source 1..20: mol_type = other DNA
ttagagttcatagatgtctc

SEQ ID NO: 8442 - DNA, 20 bp, synthetic construct
  misc_feature 1..20: note = Description of Artificial Sequence: Synthetic oligonucleotide
  misc_feature 1..20: note = Target: ANGPTL3; (-) strand; PAM type: NRG; PAM sequence: TAG
  source 1..20: mol_type = other DNA
gtttttatttttagagttca

SEQ ID NO: 8443 - DNA, 20 bp, synthetic construct
  misc_feature 1..20: note = Description of Artificial Sequence: Synthetic oligonucleotide
  misc_feature 1..20: note = Target: ANGPTL3; (-) strand; PAM type: NRG; PAM sequence: GAG
  source 1..20: mol_type = other DNA
ggtttttgtttttattttta

SEQ ID NO: 8444 - DNA, 20 bp, synthetic construct
  misc_feature 1..20: note = Description of Artificial Sequence: Synthetic oligonucleotide
  misc_feature 1..20: note = Target: ANGPTL3; (-) strand; PAM type: NRG; PAM sequence: TAG
  source 1..20: mol_type = other DNA
ttggtttttgtttttatttt

SEQ ID NO: 8445 - DNA, 20 bp, synthetic construct
  misc_feature 1..20: note = Description of Artificial Sequence: Synthetic oligonucleotide
  misc_feature 1..20: note = Target: ANGPTL3; (-) strand; PAM type: NRG; PAM sequence: TGG
  source 1..20: mol_type = other DNA
ttctctgcttcagaaagtat

SEQ ID NO: 8446 - DNA, 20 bp, synthetic construct
  misc_feature 1..20: note = Description of Artificial Sequence: Synthetic oligonucleotide
  misc_feature 1..20: note = Target: ANGPTL3; (-) strand; PAM type: NRG; PAM sequence: AAG
  source 1..20: mol_type = other DNA
gtatggttctctgcttcaga

SEQ ID NO: 8447 - DNA, 20 bp, synthetic construct
  misc_feature 1..20: note = Description of Artificial Sequence: Synthetic oligonucleotide
  misc_feature 1..20: note = Target: ANGPTL3; (-) strand; PAM type: NRG; PAM sequence: CAG
  source 1..20: mol_type = other DNA
aagtgtatggttctctgctt

SEQ ID NO: 8448 - DNA, 20 bp, synthetic construct
  misc_feature 1..20: note = Description of Artificial Sequence: Synthetic oligonucleotide
  misc_feature 1..20: note = Target: ANGPTL3; (-) strand; PAM type: NRG; PAM sequence: TGG
  source 1..20: mol_type = other DNA
tttttttctattcaagtgta

SEQ ID NO: 8449 - DNA, 20 bp, synthetic construct
  misc_feature 1..20: note = Description of Artificial Sequence: Synthetic oligonucleotide
  misc_feature 1..20: note = Target: ANGPTL3; (-) strand; PAM type: NRG; PAM sequence: AAG
  source 1..20: mol_type = other DNA
gagcatttttttttctattc

SEQ ID NO: 8450 - DNA, 20 bp, synthetic construct
  misc_feature 1..20: note = Description of Artificial Sequence: Synthetic oligonucleotide
  misc_feature 1..20: note = Target: ANGPTL3; (-) strand; PAM type: NRG; PAM sequence: GAG
  source 1..20: mol_type = other DNA
gaacgttactgaaaattcag

SEQ ID NO: 8451 - DNA, 20 bp, synthetic construct
  misc_feature 1..20: note = Description of Artificial Sequence: Synthetic oligonucleotide
  misc_feature 1..20: note = Target: ANGPTL3; (-) strand; PAM type: NRG; PAM sequence: AGG
  source 1..20: mol_type = other DNA
ctgaacgttactgaaaattc

SEQ ID NO: 8452 - DNA, 20 bp, synthetic construct
  misc_feature 1..20: note = Description of Artificial Sequence: Synthetic oligonucleotide
  misc_feature 1..20: note = Target: ANGPTL3; (-) strand; PAM type: NRG; PAM sequence: CAG
  source 1..20: mol_type = other DNA
gctgaacgttactgaaaatt

SEQ ID NO: 8453 - DNA, 20 bp, synthetic construct
  misc_feature 1..20: note = Description of Artificial Sequence: Synthetic oligonucleotide
  misc_feature 1..20: note = Target: ANGPTL3; (-) strand; PAM type: NRG; PAM sequence: CAG
  source 1..20: mol_type = other DNA
atttaaggaagtataaattt

SEQ ID NO: 8454 - DNA, 20 bp, synthetic construct
  misc_feature 1..20: note = Description of Artificial Sequence: Synthetic oligonucleotide
  misc_feature 1..20: note = Target: ANGPTL3; (-) strand; PAM type: NRG; PAM sequence: AAG
  source 1..20: mol_type = other DNA
actacattcataatttaagg

SEQ ID NO: 8455 - DNA, 20 bp, synthetic construct
  misc_feature 1..20: note = Description of Artificial Sequence: Synthetic oligonucleotide
  misc_feature 1..20: note = Target: ANGPTL3; (-) strand; PAM type: NRG; PAM sequence: AGG
  source 1..20: mol_type = other DNA
tttactacattcataattta

SEQ ID NO: 8456 - DNA, 20 bp, synthetic construct
  misc_feature 1..20: note = Description of Artificial Sequence: Synthetic oligonucleotide
  misc_feature 1..20: note = Target: ANGPTL3; (-) strand; PAM type: NRG; PAM sequence: AAG
  source 1..20: mol_type = other DNA
gtttactacattcataattt

SEQ ID NO: 8457 - DNA, 20 bp, synthetic construct
  misc_feature 1..20: note = Description of Artificial Sequence: Synthetic oligonucleotide
  misc_feature 1..20: note = Target: ANGPTL3; (-) strand; PAM type: NRG; PAM sequence: TGG
  source 1..20: mol_type = other DNA
actggtaatactgctgtggt

SEQ ID NO: 8458 - DNA, 20 bp, synthetic construct
  misc_feature 1..20: note = Description of Artificial Sequence: Synthetic oligonucleotide
  misc_feature 1..20: note = Target: ANGPTL3; (-) strand; PAM type: NRG; PAM sequence: TGG
  source 1..20: mol_type = other DNA
atatactggtaatactgctg

SEQ ID NO: 8459 - DNA, 20 bp, synthetic construct
  misc_feature 1..20: note = Description of Artificial Sequence: Synthetic oligonucleotide
  misc_feature 1..20: note = Target: ANGPTL3; (-) strand; PAM type: NRG; PAM sequence: TGG
  source 1..20: mol_type = other DNA
aatgacaaaatcttatatac

SEQ ID NO: 8460 - DNA, 20 bp, synthetic construct
  misc_feature 1..20: note = Description of Artificial Sequence: Synthetic oligonucleotide
  misc_feature 1..20: note = Target: ANGPTL3; (-) strand; PAM type: NRG; PAM sequence: TAG
  source 1..20: mol_type = other DNA
tataataataataataataa

SEQ ID NO: 8461 - DNA, 20 bp, synthetic construct
  misc_feature 1..20: note = Description of Artificial Sequence: Synthetic oligonucleotide
  misc_feature 1..20: note = Target: ANGPTL3; (-) strand; PAM type: NRG; PAM sequence: AAG
  source 1..20: mol_type = other DNA
cgcatgtatcccagaactta

SEQ ID NO: 8462 - DNA, 20 bp, synthetic construct
  misc_feature 1..20: note = Description of Artificial Sequence: Synthetic oligonucleotide
  misc_feature 1..20: note = Target: ANGPTL3; (-) strand; PAM type: NRG; PAM sequence: CAG
  source 1..20: mol_type = other DNA
cacgttctgcgcatgtatcc

SEQ ID NO: 8463 - DNA, 20 bp, synthetic construct
  misc_feature 1..20: note = Description of Artificial Sequence: Synthetic oligonucleotide
  misc_feature 1..20: note = Target: ANGPTL3; (-) strand; PAM type: NRG; PAM sequence: CAG
  source 1..20: mol_type = other DNA
agatgacgggttgatgggtg

SEQ ID NO: 8464 - DNA, 20 bp, synthetic construct
  misc_feature 1..20: note = Description of Artificial Sequence: Synthetic oligonucleotide
  misc_feature 1..20: note = Target: ANGPTL3; (-) strand; PAM type: NRG; PAM sequence: GGG
  source 1..20: mol_type = other DNA
aatgtagatgacgggttgat

SEQ ID NO: 8465 - DNA, 20 bp, synthetic construct
  misc_feature 1..20: note = Description of Artificial Sequence: Synthetic oligonucleotide
  misc_feature 1..20: note = Target: ANGPTL3; (-) strand; PAM type: NRG; PAM sequence: TGG
  source 1..20: mol_type = other DNA
taatgtagatgacgggttga

SEQ ID NO: 8466 - DNA, 20 bp, synthetic construct
  misc_feature 1..20: note = Description of Artificial Sequence: Synthetic oligonucleotide
  misc_feature 1..20: note = Target: ANGPTL3; (-) strand; PAM type: NRG; PAM sequence: GGG
  source 1..20: mol_type = other DNA
aaatacctaatgtagatgac

SEQ ID NO: 8467 - DNA, 20 bp, synthetic construct
  misc_feature 1..20: note = Description of Artificial Sequence: Synthetic oligonucleotide
  misc_feature 1..20: note = Target: ANGPTL3; (-) strand; PAM type: NRG; PAM sequence: CGG
  source 1..20: mol_type = other DNA
gaaatacctaatgtagatga

SEQ ID NO: 8468 - DNA, 20 bp, synthetic construct
  misc_feature 1..20: note = Description of Artificial Sequence: Synthetic oligonucleotide
  misc_feature 1..20: note = Target: ANGPTL3; (-) strand; PAM type: NRG; PAM sequence: TAG
  source 1..20: mol_type = other DNA
attaggagaaatacctaatg

SEQ ID NO: 8469 - DNA, 20 bp, synthetic construct
  misc_feature 1..20: note = Description of Artificial Sequence: Synthetic oligonucleotide
  misc_feature 1..20: note = Target: ANGPTL3; (-) strand; PAM type: NRG; PAM sequence: GAG
  source 1..20: mol_type = other DNA
taggggagggatagcattag

SEQ ID NO: 8470 - DNA, 20 bp, synthetic construct
  misc_feature 1..20: note = Description of Artificial Sequence: Synthetic oligonucleotide
  misc_feature 1..20: note = Target: ANGPTL3; (-) strand; PAM type: NRG; PAM sequence: AGG
  source 1..20: mol_type = other DNA
gctaggggagggatagcatt

SEQ ID NO: 8471 - DNA, 20 bp, synthetic construct
  misc_feature 1..20: note = Description of Artificial Sequence: Synthetic oligonucleotide
  misc_feature 1..20: note = Target: ANGPTL3; (-) strand; PAM type: NRG; PAM sequence: TAG
  source 1..20: mol_type = other DNA
ggctaggggagggatagcat

SEQ ID NO: 8472 - DNA, 20 bp, synthetic construct
  misc_feature 1..20: note = Description of Artificial Sequence: Synthetic oligonucleotide
  misc_feature 1..20: note = Target: ANGPTL3; (-) strand; PAM type: NRG; PAM sequence: TAG
  source 1..20: mol_type = other DNA
gggtggggctaggggaggga

SEQ ID NO: 8473 - DNA, 20 bp, synthetic construct
  misc_feature 1..20: note = Description of Artificial Sequence: Synthetic oligonucleotide
  misc_feature 1..20: note = Target: ANGPTL3; (-) strand; PAM type: NRG; PAM sequence: GGG
  source 1..20: mol_type = other DNA
gtcggggtggggctagggga

SEQ ID NO: 8474 - DNA, 20 bp, synthetic construct
  misc_feature 1..20: note = Description of Artificial Sequence: Synthetic oligonucleotide
  misc_feature 1..20: note = Target: ANGPTL3; (-) strand; PAM type: NRG; PAM sequence: AGG
  source 1..20: mol_type = other DNA
tgtcggggtggggctagggg

SEQ ID NO: 8475 - DNA, 20 bp, synthetic construct
  misc_feature 1..20: note = Description of Artificial Sequence: Synthetic oligonucleotide
  misc_feature 1..20: note = Target: ANGPTL3; (-) strand; PAM type: NRG; PAM sequence: GAG
  source 1..20: mol_type = other DNA
ctgtcggggtggggctaggg

SEQ ID NO: 8476 - DNA, 20 bp, synthetic construct
  misc_feature 1..20: note = Description of Artificial Sequence: Synthetic oligonucleotide
  misc_feature 1..20: note = Target: ANGPTL3; (-) strand; PAM type: NRG; PAM sequence: GGG
  source 1..20: mol_type = other DNA
acctgtcggggtggggctag

SEQ ID NO: 8477 - DNA, 20 bp, synthetic construct
  misc_feature 1..20: note = Description of Artificial Sequence: Synthetic oligonucleotide
  misc_feature 1..20: note = Target: ANGPTL3; (-) strand; PAM type: NRG; PAM sequence: GGG
  source 1..20: mol_type = other DNA
gacctgtcggggtggggcta

SEQ ID NO: 8478 - DNA, 20 bp, synthetic construct
  misc_feature 1..20: note = Description of Artificial Sequence: Synthetic oligonucleotide
  misc_feature 1..20: note = Target: ANGPTL3; (-) strand; PAM type: NRG; PAM sequence: AGG
  source 1..20: mol_type = other DNA
ggacctgtcggggtggggct

SEQ ID NO: 8479 - DNA, 20 bp, synthetic construct
  misc_feature 1..20: note = Description of Artificial Sequence: Synthetic oligonucleotide
  misc_feature 1..20: note = Target: ANGPTL3; (-) strand; PAM type: NRG; PAM sequence: TAG
  source 1..20: mol_type = other DNA
gggacctgtcggggtggggc

SEQ ID NO: 8480 - DNA, 20 bp, synthetic construct
  misc_feature 1..20: note = Description of Artificial Sequence: Synthetic oligonucleotide
  misc_feature 1..20: note = Target: ANGPTL3; (-) strand; PAM type: NRG; PAM sequence: GGG
  source 1..20: mol_type = other DNA
cactgggacctgtcggggtg

SEQ ID NO: 8481 - DNA, 20 bp, synthetic construct
  misc_feature 1..20: note = Description of Artificial Sequence: Synthetic oligonucleotide
  misc_feature 1..20: note = Target: ANGPTL3; (-) strand; PAM type: NRG; PAM sequence: GGG
  source 1..20: mol_type = other DNA
acactgggacctgtcggggt

SEQ ID NO: 8482 - DNA, 20 bp, synthetic construct
  misc_feature 1..20: note = Description of Artificial Sequence: Synthetic oligonucleotide
  misc_feature 1..20: note = Target: ANGPTL3; (-) strand; PAM type: NRG; PAM sequence: TGG
  source 1..20: mol_type = other DNA
cacactgggacctgtcgggg

SEQ ID NO: 8483 - DNA, 20 bp, synthetic construct
  misc_feature 1..20: note = Description of Artificial Sequence: Synthetic oligonucleotide
  misc_feature 1..20: note = Target: ANGPTL3; (-) strand; PAM type: NRG; PAM sequence: GGG
  source 1..20: mol_type = other DNA
tcacacactgggacctgtcg

SEQ ID NO: 8484 - DNA, 20 bp, synthetic construct
  misc_feature 1..20: note = Description of Artificial Sequence: Synthetic oligonucleotide
  misc_feature 1..20: note = Target: ANGPTL3; (-) strand; PAM type: NRG; PAM sequence: GGG
  source 1..20: mol_type = other DNA
atcacacactgggacctgtc

SEQ ID NO: 8485 - DNA, 20 bp, synthetic construct
  misc_feature 1..20: note = Description of Artificial Sequence: Synthetic oligonucleotide
  misc_feature 1..20: note = Target: ANGPTL3; (-) strand; PAM type: NRG; PAM sequence: CGG
  source 1..20: mol_type = other DNA
catcacacactgggacctgt

SEQ ID NO: 8486 - DNA, 20 bp, synthetic construct
  misc_feature 1..20: note = Description of Artificial Sequence: Synthetic oligonucleotide
  misc_feature 1..20: note = Target: ANGPTL3; (-) strand; PAM type: NRG; PAM sequence: GGG
  source 1..20: mol_type = other DNA
ggaaaggaacatcacacact

SEQ ID NO: 8487 - DNA, 20 bp, synthetic construct
  misc_feature 1..20: note = Description of Artificial Sequence: Synthetic oligonucleotide
  misc_feature 1..20: note = Target: ANGPTL3; (-) strand; PAM type: NRG; PAM sequence: TGG
  source 1..20: mol_type = other DNA
gggaaaggaacatcacacac

SEQ ID NO: 8488 - DNA, 20 bp, synthetic construct
  misc_feature 1..20: note = Description of Artificial Sequence: Synthetic oligonucleotide
  misc_feature 1..20: note = Target: ANGPTL3; (-) strand; PAM type: NRG; PAM sequence: AGG
  source 1..20: mol_type = other DNA
gaacacatggacacagggaa

SEQ ID NO: 8489 - DNA, 20 bp, synthetic construct
  misc_feature 1..20: note = Description of Artificial Sequence: Synthetic oligonucleotide
  misc_feature 1..20: note = Target: ANGPTL3; (-) strand; PAM type: NRG; PAM sequence: AAG
  source 1..20: mol_type = other DNA
agaacacatggacacaggga

SEQ ID NO: 8490 - DNA, 20 bp, synthetic construct
  misc_feature 1..20: note = Description of Artificial Sequence: Synthetic oligonucleotide
  misc_feature 1..20: note = Target: ANGPTL3; (-) strand; PAM type: NRG; PAM sequence: GGG
  source 1..20: mol_type = other DNA
aatgagaacacatggacaca

SEQ ID NO: 8491 - DNA, 20 bp, synthetic construct
  misc_feature 1..20: note = Description of Artificial Sequence: Synthetic oligonucleotide
  misc_feature 1..20: note = Target: ANGPTL3; (-) strand; PAM type: NRG; PAM sequence: AGG
  source 1..20: mol_type = other DNA
caatgagaacacatggacac

SEQ ID NO: 8492 - DNA, 20 bp, synthetic construct
  misc_feature 1..20: note = Description of Artificial Sequence: Synthetic oligonucleotide
  misc_feature 1..20: note = Target: ANGPTL3; (-) strand; PAM type: NRG; PAM sequence: CAG
  source 1..20: mol_type = other DNA
acaatgagaacacatggaca

SEQ ID NO: 8493 - DNA, 20 bp, synthetic construct
  misc_feature 1..20: note = Description of Artificial Sequence: Synthetic oligonucleotide
  misc_feature 1..20: note = Target: ANGPTL3; (-) strand; PAM type: NRG; PAM sequence: TGG
  source 1..20: mol_type = other DNA
agctaaacaatgagaacaca

SEQ ID NO: 8494 - DNA, 20 bp, synthetic construct
  misc_feature 1..20: note = Description of Artificial Sequence: Synthetic oligonucleotide
  misc_feature 1..20: note = Target: ANGPTL3; (-) strand; PAM type: NRG; PAM sequence: GAG
  source 1..20: mol_type = other DNA
ataagtgggagctaaacaat

SEQ ID NO: 8495 - DNA, 20 bp, synthetic construct
  misc_feature 1..20: note = Description of Artificial Sequence: Synthetic oligonucleotide
  misc_feature 1..20: note = Target: ANGPTL3; (-) strand; PAM type: NRG; PAM sequence: GAG
  source 1..20: mol_type = other DNA
atgttctcactcataagtgg

SEQ ID NO: 8496 - DNA, 20 bp, synthetic construct
  misc_feature 1..20: note = Description of Artificial Sequence: Synthetic oligonucleotide
  misc_feature 1..20: note = Target: ANGPTL3; (-) strand; PAM type: NRG; PAM sequence: GGG
  source 1..20: mol_type = other DNA
acatgttctcactcataagt

SEQ ID NO: 8497 - DNA, 20 bp, synthetic construct
  misc_feature 1..20: note = Description of Artificial Sequence: Synthetic oligonucleotide
  misc_feature 1..20: note = Target: ANGPTL3; (-) strand; PAM type: NRG; PAM sequence: TGG
  source 1..20: mol_type = other DNA
cacatgttctcactcataag

SEQ ID NO: 8498 - DNA, 20 bp, synthetic construct
  misc_feature 1..20: note = Description of Artificial Sequence: Synthetic oligonucleotide
  misc_feature 1..20: note = Target: ANGPTL3; (-) strand; PAM type: NRG; PAM sequence: AAG
  source 1..20: mol_type = other DNA
caccacatgttctcactcat

SEQ ID NO: 8499 - DNA, 20 bp, synthetic construct
  misc_feature 1..20: note = Description of Artificial Sequence: Synthetic oligonucleotide
  misc_feature 1..20: note = Target: ANGPTL3; (-) strand; PAM type: NRG; PAM sequence: CAG
  source 1..20: mol_type = other DNA
tcagcaaactaacacaggaa

SEQ ID NO: 8500 - DNA, 20 bp, synthetic construct
  misc_feature 1..20: note = Description of Artificial Sequence: Synthetic oligonucleotide
  misc_feature 1..20: note = Target: ANGPTL3; (-) strand; PAM type: NRG; PAM sequence: AGG
  source 1..20: mol_type = other DNA
cattctcagcaaactaacac

SEQ ID NO: 8501 - DNA, 20 bp, synthetic construct
  misc_feature 1..20: note = Description of Artificial Sequence: Synthetic oligonucleotide
  misc_feature 1..20: note = Target: ANGPTL3; (-) strand; PAM type: NRG; PAM sequence: CAG
  source 1..20: mol_type = other DNA
tcattctcagcaaactaaca

SEQ ID NO: 8502 - DNA, 20 bp, synthetic construct
  misc_feature 1..20: note = Description of Artificial Sequence: Synthetic oligonucleotide
  misc_feature 1..20: note = Target: ANGPTL3; (-) strand; PAM type: NRG; PAM sequence: CAG
  source 1..20: mol_type = other DNA
aagctggaaaccatcattct

SEQ ID NO: 8503 - DNA, 20 bp, synthetic construct
  misc_feature 1..20: note = Description of Artificial Sequence: Synthetic oligonucleotide
  misc_feature 1..20: note = Target: ANGPTL3; (-) strand; PAM type: NRG; PAM sequence: TGG
  source 1..20: mol_type = other DNA
tgtagggacatggatgaagc

SEQ ID NO: 8504 - DNA, 20 bp, synthetic construct
  misc_feature 1..20: note = Description of Artificial Sequence: Synthetic oligonucleotide
  misc_feature 1..20: note = Target: ANGPTL3; (-) strand; PAM type: NRG; PAM sequence: AAG
  source 1..20: mol_type = other DNA
cctttgtagggacatggatg

SEQ ID NO: 8505 - DNA, 20 bp, synthetic construct
  misc_feature 1..20: note = Description of Artificial Sequence: Synthetic oligonucleotide
  misc_feature 1..20: note = Target: ANGPTL3; (-) strand; PAM type: NRG; PAM sequence: TGG
  source 1..20: mol_type = other DNA
tcatgtcctttgtagggaca

SEQ ID NO: 8506 - DNA, 20 bp, synthetic construct
  misc_feature 1..20: note = Description of Artificial Sequence: Synthetic oligonucleotide
  misc_feature 1..20: note = Target: ANGPTL3; (-) strand; PAM type: NRG; PAM sequence: GGG
  source 1..20: mol_type = other DNA
atgagttcatgtcctttgta

SEQ ID NO: 8507 - DNA, 20 bp, synthetic construct
  misc_feature 1..20: note = Description of Artificial Sequence: Synthetic oligonucleotide
  misc_feature 1..20: note = Target: ANGPTL3; (-) strand; PAM type: NRG; PAM sequence: AGG
  source 1..20: mol_type = other DNA
gatgagttcatgtcctttgt

SEQ ID NO: 8508 - DNA, 20 bp, synthetic construct
  misc_feature 1..20: note = Description of Artificial Sequence: Synthetic oligonucleotide
  misc_feature 1..20: note = Target: ANGPTL3; (-) strand; PAM type: NRG; PAM sequence: TAG
  source 1..20: mol_type = other DNA
ggatgagttcatgtcctttg

SEQ ID NO: 8509 - DNA, 20 bp, synthetic construct
  misc_feature 1..20: note = Description of Artificial Sequence: Synthetic oligonucleotide
  misc_feature 1..20: note = Target: ANGPTL3; (-) strand; PAM type: NRG; PAM sequence: GAG
  source 1..20: mol_type = other DNA
atgcagccataaaaaaggat

SEQ ID NO: 8510 - DNA, 20 bp, synthetic construct
  misc_feature 1..20: note = Description of Artificial Sequence: Synthetic oligonucleotide
  misc_feature 1..20: note = Target: ANGPTL3; (-) strand; PAM type: NRG; PAM sequence: AGG
  source 1..20: mol_type = other DNA
atactatgcagccataaaaa

SEQ ID NO: 8511 - DNA, 20 bp, synthetic construct
  misc_feature 1..20: note = Description of Artificial Sequence: Synthetic oligonucleotide
  misc_feature 1..20: note = Target: ANGPTL3; (-) strand; PAM type: NRG; PAM sequence: AAG
  source 1..20: mol_type = other DNA
aatactatgcagccataaaa

SEQ ID NO: 8512 - DNA, 20 bp, synthetic construct
  misc_feature 1..20: note = Description of Artificial Sequence: Synthetic oligonucleotide
  misc_feature 1..20: note = Target: ANGPTL3; (-) strand; PAM type: NRG; PAM sequence: CAG
  source 1..20: mol_type = other DNA
atacaccatggaatactatg

SEQ ID NO: 8513 - DNA, 20 bp, synthetic construct
  misc_feature 1..20: note = Description of Artificial Sequence: Synthetic oligonucleotide
  misc_feature 1..20: note = Target: ANGPTL3; (-) strand; PAM type: NRG; PAM sequence: TGG
  source 1..20: mol_type = other DNA
aatgtggcacatatacacca

SEQ ID NO: 8514 - DNA, 20 bp, synthetic construct
  misc_feature 1..20: note = Description of Artificial Sequence: Synthetic oligonucleotide
  misc_feature 1..20: note = Target: ANGPTL3; (-) strand; PAM type: NRG; PAM sequence: TGG
  source 1..20: mol_type = other DNA
tagactggatgaagaaaatg

SEQ ID NO: 8515 - DNA, 20 bp, synthetic construct
  misc_feature 1..20: note = Description of Artificial Sequence: Synthetic oligonucleotide
  misc_feature 1..20: note = Target: ANGPTL3; (-) strand; PAM type: NRG; PAM sequence: AAG
  source 1..20: mol_type = other DNA
catcaatgatagactggatg

SEQ ID NO: 8516 - DNA, 20 bp, synthetic construct
  misc_feature 1..20: note = Description of Artificial Sequence: Synthetic oligonucleotide
  misc_feature 1..20: note = Target: ANGPTL3; (-) strand; PAM type: NRG; PAM sequence: TGG
  source 1..20: mol_type = other DNA
aatgcccatcaatgatagac

SEQ ID NO: 8517 - DNA, 20 bp, synthetic construct
  misc_feature 1..20: note = Description of Artificial Sequence: Synthetic oligonucleotide
  misc_feature 1..20: note = Target: ANGPTL3; (-) strand; PAM type: NRG; PAM sequence: TAG
  source 1..20: mol_type = other DNA
acccaaatgcccatcaatga

SEQ ID NO: 8518 - DNA, 20 bp, synthetic construct
  misc_feature 1..20: note = Description of Artificial Sequence: Synthetic oligonucleotide
  misc_feature 1..20: note = Target: ANGPTL3; (-) strand; PAM type: NRG; PAM sequence: TGG
  source 1..20: mol_type = other DNA
tattcacaataacaaagact

SEQ ID NO: 8519 - DNA, 20 bp, synthetic construct
  misc_feature 1..20: note = Description of Artificial Sequence: Synthetic oligonucleotide
  misc_feature 1..20: note = Target: ANGPTL3; (-) strand; PAM type: NRG; PAM sequence: AAG
  source 1..20: mol_type = other DNA
cagcactattcacaataaca

SEQ ID NO: 8520 - DNA, 20 bp, synthetic construct
  misc_feature 1..20: note = Description of Artificial Sequence: Synthetic oligonucleotide
  misc_feature 1..20: note = Target: ANGPTL3; (-) strand; PAM type: NRG; PAM sequence: CAG
  source 1..20: mol_type = other DNA
acatgcacacatgtttattg

SEQ ID NO: 8521 - DNA, 20 bp, synthetic construct
  misc_feature 1..20: note = Description of Artificial Sequence: Synthetic oligonucleotide
  misc_feature 1..20: note = Target: ANGPTL3; (-) strand; PAM type: NRG; PAM sequence: AAG
  source 1..20: mol_type = other DNA
ttataaatcattctactata

SEQ ID NO: 8522 - DNA, 20 bp, synthetic construct
  misc_feature 1..20: note = Description of Artificial Sequence: Synthetic oligonucleotide
  misc_feature 1..20: note = Target: ANGPTL3; (-) strand; PAM type: NRG; PAM sequence: AGG
  source 1..20: mol_type = other DNA
attattgggtatatattcaa

SEQ ID NO: 8523 - DNA, 20 bp, synthetic construct
  misc_feature 1..20: note = Description of Artificial Sequence: Synthetic oligonucleotide
  misc_feature 1..20: note = Target: ANGPTL3; (-) strand; PAM type: NRG; PAM sequence: AAG
  source 1..20: mol_type = other DNA
cattattgggtatatattca

SEQ ID NO: 8524 - DNA, 20 bp, synthetic construct
  misc_feature 1..20: note = Description of Artificial Sequence: Synthetic oligonucleotide
  misc_feature 1..20: note = Target: ANGPTL3; (-) strand; PAM type: NRG; PAM sequence: GGG
  source 1..20: mol_type = other DNA
gacccagtaatcccattatt

SEQ ID NO: 8525 - DNA, 20 bp, synthetic construct
  misc_feature 1..20: note = Description of Artificial Sequence: Synthetic oligonucleotide
  misc_feature 1..20: note = Target: ANGPTL3; (-) strand; PAM type: NRG; PAM sequence: TGG
  source 1..20: mol_type = other DNA
tgacccagtaatcccattat

SEQ ID NO: 8526 - DNA, 20 bp, synthetic construct
  misc_feature 1..20: note = Description of Artificial Sequence: Synthetic oligonucleotide
  misc_feature 1..20: note = Target: ANGPTL3; (-) strand; PAM type: NRG; PAM sequence: CAG
  source 1..20: mol_type = other DNA
actagaaataccatttgacc

SEQ ID NO: 8527 - DNA, 20 bp, synthetic construct
  misc_feature 1..20: note = Description of Artificial Sequence: Synthetic oligonucleotide
  misc_feature 1..20: note = Target: ANGPTL3; (-) strand; PAM type: NRG; PAM sequence: TAG
  source 1..20: mol_type = other DNA
attcctcaaggaactagaac

SEQ ID NO: 8528 - DNA, 20 bp, synthetic construct
  misc_feature 1..20: note = Description of Artificial Sequence: Synthetic oligonucleotide
  misc_feature 1..20: note = Target: ANGPTL3; (-) strand; PAM type: NRG; PAM sequence: TAG
  source 1..20: mol_type = other DNA
gtggcgattcctcaaggaac

SEQ ID NO: 8529 - DNA, 20 bp, synthetic construct
  misc_feature 1..20: note = Description of Artificial Sequence: Synthetic oligonucleotide
  misc_feature 1..20: note = Target: ANGPTL3; (-) strand; PAM type: NRG; PAM sequence: AGG
  source 1..20: mol_type = other DNA
gacagtgtggcgattcctca

SEQ ID NO: 8530 - DNA, 20 bp, synthetic construct
  misc_feature 1..20: note = Description of Artificial Sequence: Synthetic oligonucleotide
  misc_feature 1..20: note = Target: ANGPTL3; (-) strand; PAM type: NRG; PAM sequence: AAG
  source 1..20: mol_type = other DNA
agacagtgtggcgattcctc

SEQ ID NO: 8531 - DNA, 20 bp, synthetic construct
  misc_feature 1..20: note = Description of Artificial Sequence: Synthetic oligonucleotide
  misc_feature 1..20: note = Target: ANGPTL3; (-) strand; PAM type: NRG; PAM sequence: TGG
  source 1..20: mol_type = other DNA
aaccattgtggaagacagtg

SEQ ID NO: 8532 - DNA, 20 bp, synthetic construct
  misc_feature 1..20: note = Description of Artificial Sequence: Synthetic oligonucleotide
  misc_feature 1..20: note = Target: ANGPTL3; (-) strand; PAM type: NRG; PAM sequence: CAG
  source 1..20: mol_type = other DNA
agttcaaccattgtggaaga

SEQ ID NO: 8533 - DNA, 20 bp, synthetic construct
  misc_feature 1..20: note = Description of Artificial Sequence: Synthetic oligonucleotide
  misc_feature 1..20: note = Target: ANGPTL3; (-) strand; PAM type: NRG; PAM sequence: AAG
  source 1..20: mol_type = other DNA
aattagttcaaccattgtgg

SEQ ID NO: 8534 - DNA, 20 bp, synthetic construct
  misc_feature 1..20: note = Description of Artificial Sequence: Synthetic oligonucleotide
  misc_feature 1..20: note = Target: ANGPTL3; (-) strand; PAM type: NRG; PAM sequence: TGG
  source 1..20: mol_type = other DNA
tcaaattagttcaaccattg

SEQ ID NO: 8535 - DNA, 20 bp, synthetic construct
  misc_feature 1..20: note = Description of Artificial Sequence: Synthetic oligonucleotide
  misc_feature 1..20: note = Target: ANGPTL3; (-) strand; PAM type: NRG; PAM sequence: TAG
  source 1..20: mol_type = other DNA
aaaatatgtatgtttcaaat

SEQ ID NO: 8536 - DNA, 20 bp, synthetic construct
  misc_feature 1..20: note = Description of Artificial Sequence: Synthetic oligonucleotide
  misc_feature 1..20: note = Target: ANGPTL3; (-) strand; PAM type: NRG; PAM sequence: TAG
  source 1..20: mol_type = other DNA
atattttgagatgtctataa

SEQ ID NO: 8537 - DNA, 20 bp, synthetic construct
  misc_feature 1..20: note = Description of Artificial Sequence: Synthetic oligonucleotide
  misc_feature 1..20: note = Target: ANGPTL3; (-) strand; PAM type: NRG; PAM sequence: GAG
  source 1..20: mol_type = other DNA
ataagcatcaacaatatttt

SEQ ID NO: 8538 - DNA, 20 bp, synthetic construct
  misc_feature 1..20: note = Description of Artificial Sequence: Synthetic oligonucleotide
  misc_feature 1..20: note = Target: ANGPTL3; (-) strand; PAM type: NRG; PAM sequence: AAG
  source 1..20: mol_type = other DNA
tgtattttctaaatagtaat

SEQ ID NO: 8539 - DNA, 20 bp, synthetic construct
  misc_feature 1..20: note = Description of Artificial Sequence: Synthetic oligonucleotide
  misc_feature 1..20: note = Target: ANGPTL3; (-) strand; PAM type: NRG; PAM sequence: TAG
  source 1..20: mol_type = other DNA
aaactattgtattttctaaa

SEQ ID NO: 8540 - DNA, 20 bp, synthetic construct
  misc_feature 1..20: note = Description of Artificial Sequence: Synthetic oligonucleotide
  misc_feature 1..20: note = Target: ANGPTL3; (+) strand; PAM type: NRG; PAM sequence: GAG
  source 1..20: mol_type = other DNA
aagtgataccataaacgcag

SEQ ID NO: 8541 - DNA, 20 bp, synthetic construct
  misc_feature 1..20: note = Description of Artificial Sequence: Synthetic oligonucleotide
  misc_feature 1..20: note = Target: ANGPTL3; (+) strand; PAM type: NRG; PAM sequence: AGG
  source 1..20: mol_type = other DNA
agtgataccataaacgcagg

SEQ ID NO: 8542 - DNA, 20 bp, synthetic construct
  misc_feature 1..20: note = Description of Artificial Sequence: Synthetic oligonucleotide
  misc_feature 1..20: note = Target: ANGPTL3; (+) strand; PAM type: NRG; PAM sequence: AAG
  source 1..20: mol_type = other DNA
gataccataaacgcaggagg

SEQ ID NO: 8543 - DNA, 20 bp, synthetic construct
  misc_feature 1..20: note = Description of Artificial Sequence: Synthetic oligonucleotide
  misc_feature 1..20: note = Target: ANGPTL3; (+) strand; PAM type: NRG; PAM sequence: AAG
  source 1..20: mol_type = other DNA
tgtttgttatatatataaca

SEQ ID NO: 8544 - DNA, 20 bp, synthetic construct
  misc_feature 1..20: note = Description of Artificial Sequence: Synthetic oligonucleotide
  misc_feature 1..20: note = Target: ANGPTL3; (+) strand; PAM type: NRG; PAM sequence: TAG
  source 1..20: mol_type = other DNA
ttatatatataacaaagaat

SEQ ID NO: 8545 - DNA, 20 bp, synthetic construct
  misc_feature 1..20: note = Description of Artificial Sequence: Synthetic oligonucleotide
  misc_feature 1..20: note = Target: ANGPTL3; (+) strand; PAM type: NRG; PAM sequence: TAG
  source 1..20: mol_type = other DNA
atgtaaataattcctaaaat

SEQ ID NO: 8546 - DNA, 20 bp, synthetic construct
  misc_feature 1..20: note = Description of Artificial Sequence: Synthetic oligonucleotide
  misc_feature 1..20: note = Target: ANGPTL3; (+) strand; PAM type: NRG; PAM sequence: CAG
  source 1..20: mol_type = other DNA
aaataattcctaaaattagt

SEQ ID NO: 8547 - DNA, 20 bp, synthetic construct
  misc_feature 1..20: note = Description of Artificial Sequence: Synthetic oligonucleotide
  misc_feature 1..20: note = Target: ANGPTL3; (+) strand; PAM type: NRG; PAM sequence: AAG
  source 1..20: mol_type = other DNA
aattcctaaaattagtcaga

SEQ ID NO: 8548 - DNA, 20 bp, synthetic construct
  misc_feature 1..20: note = Description of Artificial Sequence: Synthetic oligonucleotide
  misc_feature 1..20: note = Target: ANGPTL3; (+) strand; PAM type: NRG; PAM sequence: GAG
  source 1..20: mol_type = other DNA
ttcctaaaattagtcagaaa

SEQ ID NO: 8549 - DNA, 20 bp, synthetic construct
  misc_feature 1..20: note = Description of Artificial Sequence: Synthetic oligonucleotide
  misc_feature 1..20: note = Target: ANGPTL3; (+) strand; PAM type: NRG; PAM sequence: AAG
  source 1..20: mol_type = other DNA
cagaaagagacaaacttaaa

SEQ ID NO: 8550 - DNA, 20 bp, synthetic construct
  misc_feature 1..20: note = Description of Artificial Sequence: Synthetic oligonucleotide
  misc_feature 1..20: note = Target: ANGPTL3; (+) strand; PAM type: NRG; PAM sequence: GAG
  source 1..20: mol_type = other DNA
gaaagagacaaacttaaaaa

SEQ ID NO: 8551 - DNA, 20 bp, synthetic construct
  misc_feature 1..20: note = Description of Artificial Sequence: Synthetic oligonucleotide
  misc_feature 1..20: note = Target: ANGPTL3; (+) strand; PAM type: NRG; PAM sequence: AGG
  source 1..20: mol_type = other DNA
aaagagacaaacttaaaaag

SEQ ID NO: 8552 - DNA, 20 bp, synthetic construct
  misc_feature 1..20: note = Description of Artificial Sequence: Synthetic oligonucleotide
  misc_feature 1..20: note = Target: ANGPTL3; (+) strand; PAM type: NRG; PAM sequence: GGG
  source 1..20: mol_type = other DNA
aagagacaaacttaaaaaga

SEQ ID NO: 8553 - DNA, 20 bp, synthetic construct
  misc_feature 1..20: note = Description of Artificial Sequence: Synthetic oligonucleotide
  misc_feature 1..20: note = Target: ANGPTL3; (+) strand; PAM type: NRG; PAM sequence: AAG
  source 1..20: mol_type = other DNA
aaacttaaaaagagggtaac

SEQ ID NO: 8554 - DNA, 20 bp, synthetic construct
  misc_feature 1..20: note = Description of Artificial Sequence: Synthetic oligonucleotide
  misc_feature 1..20: note = Target: ANGPTL3; (+) strand; PAM type: NRG; PAM sequence: AGG
  source 1..20: mol_type = other DNA
aacttaaaaagagggtaaca

SEQ ID NO: 8555 - DNA, 20 bp, synthetic construct
  misc_feature 1..20: note = Description of Artificial Sequence: Synthetic oligonucleotide
  misc_feature 1..20: note = Target: ANGPTL3; (+) strand; PAM type: NRG; PAM sequence: GAG
  source 1..20: mol_type = other DNA
cttaaaaagagggtaacaag

SEQ ID NO: 8556 - DNA, 20 bp, synthetic construct
  misc_feature 1..20: note = Description of Artificial Sequence: Synthetic oligonucleotide
  misc_feature 1..20: note = Target: ANGPTL3; (+) strand; PAM type: NRG; PAM sequence: AGG
  source 1..20: mol_type = other DNA
ttaaaaagagggtaacaagg

SEQ ID NO: 8557 - DNA, 20 bp, synthetic construct
  misc_feature 1..20: note = Description of Artificial Sequence: Synthetic oligonucleotide
  misc_feature 1..20: note = Target: ANGPTL3; (+) strand; PAM type: NRG; PAM sequence: GGG
  source 1..20: mol_type = other DNA
taaaaagagggtaacaagga

SEQ ID NO: 8558 - DNA, 20 bp, synthetic construct
  misc_feature 1..20: note = Description of Artificial Sequence: Synthetic oligonucleotide
  misc_feature 1..20: note = Target: ANGPTL3; (+) strand; PAM type: NRG; PAM sequence: GGG
  source 1..20: mol_type = other DNA
aaaaagagggtaacaaggag

SEQ ID NO: 8559 - DNA, 20 bp, synthetic construct
  misc_feature 1..20: note = Description of Artificial Sequence: Synthetic oligonucleotide
  misc_feature 1..20: note = Target: ANGPTL3; (+) strand; PAM type: NRG; PAM sequence: GAG
  source 1..20: mol_type = other DNA
aaagagggtaacaaggaggg

SEQ ID NO: 8560 - DNA, 20 bp, synthetic construct
  misc_feature 1..20: note = Description of Artificial Sequence: Synthetic oligonucleotide
  misc_feature 1..20: note = Target: ANGPTL3; (+) strand; PAM type: NRG; PAM sequence: CAG
  source 1..20: mol_type = other DNA
gagcaaattatgtacataac

SEQ ID NO: 8561 - DNA, 20 bp, synthetic construct
  misc_feature 1..20: note = Description of Artificial Sequence: Synthetic oligonucleotide
  misc_feature 1..20: note = Target: ANGPTL3; (+) strand; PAM type: NRG; PAM sequence: AAG
  source 1..20: mol_type = other DNA
acataaccagatgattcgca

SEQ ID NO: 8562 - DNA, 20 bp, synthetic construct
  misc_feature 1..20: note = Description of Artificial Sequence: Synthetic oligonucleotide
  misc_feature 1..20: note = Target: ANGPTL3; (+) strand; PAM type: NRG; PAM sequence: CGG
  source 1..20: mol_type = other DNA
aaccagatgattcgcaaaga

SEQ ID NO: 8563 - DNA, 20 bp, synthetic construct
  misc_feature 1..20: note = Description of Artificial Sequence: Synthetic oligonucleotide
  misc_feature 1..20: note = Target: ANGPTL3; (+) strand; PAM type: NRG; PAM sequence: CAG
  source 1..20: mol_type = other DNA
atgattcgcaaagacggcaa

SEQ ID NO: 8564 - DNA, 20 bp, synthetic construct
  misc_feature 1..20: note = Description of Artificial Sequence: Synthetic oligonucleotide
  misc_feature 1..20: note = Target: ANGPTL3; (+) strand; PAM type: NRG; PAM sequence: GAG
  source 1..20: mol_type = other DNA
gattcgcaaagacggcaaca

SEQ ID NO: 8565 - DNA, 20 bp, synthetic construct
  misc_feature 1..20: note = Description of Artificial Sequence: Synthetic oligonucleotide
  misc_feature 1..20: note = Target: ANGPTL3; (+) strand; PAM type: NRG; PAM sequence: TGG
  source 1..20: mol_type = other DNA
cgcaaagacggcaacagaga

SEQ ID NO: 8566 - DNA, 20 bp, synthetic construct
  misc_feature 1..20: note = Description of Artificial Sequence: Synthetic oligonucleotide
  misc_feature 1..20: note = Target: ANGPTL3; (+) strand; PAM type: NRG; PAM sequence: CAG
  source 1..20: mol_type = other DNA
aagacggcaacagagatggc

SEQ ID NO: 8567 - DNA, 20 bp, synthetic construct
  misc_feature 1..20: note = Description of Artificial Sequence: Synthetic oligonucleotide
  misc_feature 1..20: note = Target: ANGPTL3; (+) strand; PAM type: NRG; PAM sequence: TAG
  source 1..20: mol_type = other DNA
agatggccagcaaaacaaac

SEQ ID NO: 8568 - DNA, 20 bp, synthetic construct
  misc_feature 1..20: note = Description of Artificial Sequence: Synthetic oligonucleotide
  misc_feature 1..20: note = Target: ANGPTL3; (+) strand; PAM type: NRG; PAM sequence: TAG
  source 1..20: mol_type = other DNA
ctagatatatacttgtctat

SEQ ID NO: 8569 - DNA, 20 bp, synthetic construct
  misc_feature 1..20: note = Description of Artificial Sequence: Synthetic oligonucleotide
  misc_feature 1..20: note = Target: ANGPTL3; (+) strand; PAM type: NRG; PAM sequence: AAG
  source 1..20: mol_type = other DNA
ttttttgcctttttcattaa

SEQ ID NO: 8570 - DNA, 20 bp, synthetic construct
  misc_feature 1..20: note = Description of Artificial Sequence: Synthetic oligonucleotide
  misc_feature 1..20: note = Target: ANGPTL3; (+) strand; PAM type: NRG; PAM sequence: AAG
  source 1..20: mol_type = other DNA
ttcattaaaagcatttgtaa

SEQ ID NO: 8571 - DNA, 20 bp, synthetic construct
  misc_feature 1..20: note = Description of Artificial Sequence: Synthetic oligonucleotide
  misc_feature 1..20: note = Target: ANGPTL3; (+) strand; PAM type: NRG; PAM sequence: AGG
  source 1..20: mol_type = other DNA
tcattaaaagcatttgtaaa

SEQ ID NO: 8572 - DNA, 20 bp, synthetic construct
  misc_feature 1..20: note = Description of Artificial Sequence: Synthetic oligonucleotide
  misc_feature 1..20: note = Target: ANGPTL3; (+) strand; PAM type: NRG; PAM sequence: TAG
  source 1..20: mol_type = other DNA
aaagcatttgtaaaaggata

SEQ ID NO: 8573 - DNA, 20 bp, synthetic construct
  misc_feature 1..20: note = Description of Artificial Sequence: Synthetic oligonucleotide
  misc_feature 1..20: note = Target: ANGPTL3; (+) strand; PAM type: NRG; PAM sequence: AGG
  source 1..20: mol_type = other DNA
aagcatttgtaaaaggatat

SEQ ID NO: 8574 - DNA, 20 bp, synthetic construct
  misc_feature 1..20: note = Description of Artificial Sequence: Synthetic oligonucleotide
  misc_feature 1..20: note = Target: ANGPTL3; (+) strand; PAM type: NRG; PAM sequence: AAG
  source 1..20: mol_type = other DNA
tttgtaaaaggatataggaa

SEQ ID NO: 8575 - DNA, 20 bp, synthetic construct
  misc_feature 1..20: note = Description of Artificial Sequence: Synthetic oligonucleotide
  misc_feature 1..20: note = Target: ANGPTL3; (+) strand; PAM type: NRG; PAM sequence: GAG
  source 1..20: mol_type = other DNA
tgtaaaaggatataggaaaa

SEQ ID NO: 8576 - DNA, 20 bp, synthetic construct
  misc_feature 1..20: note = Description of Artificial Sequence: Synthetic oligonucleotide
  misc_feature 1..20: note = Target: ANGPTL3; (+) strand; PAM type: NRG; PAM sequence: AGG
  source 1..20: mol_type = other DNA
gtaaaaggatataggaaaag

SEQ ID NO: 8577 - DNA, 20 bp, synthetic construct
  misc_feature 1..20: note = Description of Artificial Sequence: Synthetic oligonucleotide
  misc_feature 1..20: note = Target: ANGPTL3; (+) strand; PAM type: NRG; PAM sequence: TGG
  source 1..20: mol_type = other DNA
gaggaactctcatatactcc

SEQ ID NO: 8578 - DNA, 20 bp, synthetic construct
  misc_feature 1..20: note = Description of Artificial Sequence: Synthetic oligonucleotide
  misc_feature 1..20: note = Target: ANGPTL3; (+) strand; PAM type: NRG; PAM sequence: CAG
  source 1..20: mol_type = other DNA
gaactctcatatactcctgg

SEQ ID NO: 8579 - DNA, 20 bp, synthetic construct
  misc_feature 1..20: note = Description of Artificial Sequence: Synthetic oligonucleotide
  misc_feature 1..20: note = Target: ANGPTL3; (+) strand; PAM type: NRG; PAM sequence: AGG
  source 1..20: mol_type = other DNA
aactctcatatactcctggc

SEQ ID NO: 8580 - DNA, 20 bp, synthetic construct
  misc_feature 1..20: note = Description of Artificial Sequence: Synthetic oligonucleotide
  misc_feature 1..20: note = Target: ANGPTL3; (+) strand; PAM type: NRG; PAM sequence: GGG
  source 1..20: mol_type = other DNA
actctcatatactcctggca

SEQ ID NO: 8581 - DNA, 20 bp, synthetic construct
  misc_feature 1..20: note = Description of Artificial Sequence: Synthetic oligonucleotide
  misc_feature 1..20: note = Target: ANGPTL3; (+) strand; PAM type: NRG; PAM sequence: TGG
  source 1..20: mol_type = other DNA
ctcctggcagggatgtaaat

SEQ ID NO: 8582 - DNA, 20 bp, synthetic construct
  misc_feature 1..20: note = Description of Artificial Sequence: Synthetic oligonucleotide
  misc_feature 1..20: note = Target: ANGPTL3; (+) strand; PAM type: NRG; PAM sequence: AAG
  source 1..20: mol_type = other DNA
aaattggtacaacccttttg

SEQ ID NO: 8583 - DNA, 20 bp, synthetic construct
  misc_feature 1..20: note = Description of Artificial Sequence: Synthetic oligonucleotide
  misc_feature 1..20: note = Target: ANGPTL3; (+) strand; PAM type: NRG; PAM sequence: AGG
  source 1..20: mol_type = other DNA
aattggtacaacccttttga

SEQ ID NO: 8584 - DNA, 20 bp, synthetic construct
  misc_feature 1..20: note = Description of Artificial Sequence: Synthetic oligonucleotide
  misc_feature 1..20: note = Target: ANGPTL3; (+) strand; PAM type: NRG; PAM sequence: AAG
  source 1..20: mol_type = other DNA
tttgaaggacaatctgacaa

SEQ ID NO: 8585 - DNA, 20 bp, synthetic construct
  misc_feature 1..20: note = Description of Artificial Sequence: Synthetic oligonucleotide
  misc_feature 1..20: note = Target: ANGPTL3; (+) strand; PAM type: NRG; PAM sequence: AAG
  source 1..20: mol_type = other DNA
aatctgacaaaagcaatcgt

SEQ ID NO: 8586 - DNA, 20 bp, synthetic construct
  misc_feature 1..20: note = Description of Artificial Sequence: Synthetic oligonucleotide
  misc_feature 1..20: note = Target: ANGPTL3; (+) strand; PAM type: NRG; PAM sequence: AAG
  source 1..20: mol_type = other DNA
caaaagcaatcgtaagttac

SEQ ID NO: 8587 - DNA, 20 bp, synthetic construct
  misc_feature 1..20: note = Description of Artificial Sequence: Synthetic oligonucleotide
  misc_feature 1..20: note = Target: ANGPTL3; (+) strand; PAM type: NRG; PAM sequence: AAG
  source 1..20: mol_type = other DNA
tacatacatcaccaccataa

SEQ ID NO: 8588 - DNA, 20 bp, synthetic construct
  misc_feature 1..20: note = Description of Artificial Sequence: Synthetic oligonucleotide
  misc_feature 1..20: note = Target: ANGPTL3; (+) strand; PAM type: NRG; PAM sequence: TAG
  source 1..20: mol_type = other DNA
ctatacatactgtttataat

SEQ ID NO: 8589 - DNA, 20 bp, synthetic construct
  misc_feature 1..20: note = Description of Artificial Sequence: Synthetic oligonucleotide
  misc_feature 1..20: note = Target: ANGPTL3; (+) strand; PAM type: NRG; PAM sequence: TGG
  source 1..20: mol_type = other DNA
actgtttataattagaaaat

SEQ ID NO: 8590 - DNA, 20 bp, synthetic construct
  misc_feature 1..20: note = Description of Artificial Sequence: Synthetic oligonucleotide
  misc_feature 1..20: note = Target: ANGPTL3; (+) strand; PAM type: NRG; PAM sequence: AAG
  source 1..20: mol_type = other DNA
aattggaaacaaatgattaa

SEQ ID NO: 8591 - DNA, 20 bp, synthetic construct
  misc_feature 1..20: note = Description of Artificial Sequence: Synthetic oligonucleotide
  misc_feature 1..20: note = Target: ANGPTL3; (+) strand; PAM type: NRG; PAM sequence: AGG
  source 1..20: mol_type = other DNA
attggaaacaaatgattaaa

SEQ ID NO: 8592 - DNA, 20 bp, synthetic construct
  misc_feature 1..20: note = Description of Artificial Sequence: Synthetic oligonucleotide
  misc_feature 1..20: note = Target: ANGPTL3; (+) strand; PAM type: NRG; PAM sequence: GGG
  source 1..20: mol_type = other DNA
ttggaaacaaatgattaaaa

SEQ ID NO: 8593 - DNA, 20 bp, synthetic construct
  misc_feature 1..20: note = Description of Artificial Sequence: Synthetic oligonucleotide
  misc_feature 1..20: note = Target: ANGPTL3; (+) strand; PAM type: NRG; PAM sequence: GGG
  source 1..20: mol_type = other DNA
tggaaacaaatgattaaaag

SEQ ID NO: 8594 - DNA, 20 bp, synthetic construct
  misc_feature 1..20: note = Description of Artificial Sequence: Synthetic oligonucleotide
  misc_feature 1..20: note = Target: ANGPTL3; (+) strand; PAM type: NRG; PAM sequence: GGG
  source 1..20: mol_type = other DNA
ggaaacaaatgattaaaagg

SEQ ID NO: 8595 - DNA, 20 bp, synthetic construct
  misc_feature 1..20: note = Description of Artificial Sequence: Synthetic oligonucleotide
  misc_feature 1..20: note = Target: ANGPTL3; (+) strand; PAM type: NRG; PAM sequence: AAG
  source 1..20: mol_type = other DNA
aaaagggggctgattaaatt

SEQ ID NO: 8596 - DNA, 20 bp, synthetic construct
  misc_feature 1..20: note = Description of Artificial Sequence: Synthetic oligonucleotide
  misc_feature 1..20: note = Target: ANGPTL3; (+) strand; PAM type: NRG; PAM sequence: AGG
  source 1..20: mol_type = other DNA
aaagggggctgattaaatta

SEQ ID NO: 8597 - DNA, 20 bp, synthetic construct
  misc_feature 1..20: note = Description of Artificial Sequence: Synthetic oligonucleotide
  misc_feature 1..20: note = Target: ANGPTL3; (+) strand; PAM type: NRG; PAM sequence: CAG
  source 1..20: mol_type = other DNA
attaaggttcatctatataa

SEQ ID NO: 8598 - DNA, 20 bp, synthetic construct
  misc_feature 1..20: note = Description of Artificial Sequence: Synthetic oligonucleotide
  misc_feature 1..20: note = Target: ANGPTL3; (+) strand; PAM type: NRG; PAM sequence: AGG
  source 1..20: mol_type = other DNA
ttaaggttcatctatataac

SEQ ID NO: 8599 - DNA, 20 bp, synthetic construct
  misc_feature 1..20: note = Description of Artificial Sequence: Synthetic oligonucleotide
  misc_feature 1..20: note = Target: ANGPTL3; (+) strand; PAM type: NRG; PAM sequence: CAG
  source 1..20: mol_type = other DNA
atctatataacaggattatg

SEQ ID NO: 8600 - DNA, 20 bp, synthetic construct
  misc_feature 1..20: note = Description of Artificial Sequence: Synthetic oligonucleotide
  misc_feature 1..20: note = Target: ANGPTL3; (+) strand; PAM type: NRG; PAM sequence: AAG
  source 1..20: mol_type = other DNA
aggattatgcagctattaaa

SEQ ID NO: 8601 - DNA, 20 bp, synthetic construct
  misc_feature 1..20: note = Description of Artificial Sequence: Synthetic oligonucleotide
  misc_feature 1..20: note = Target: ANGPTL3; (+) strand; PAM type: NRG; PAM sequence: AGG
  source 1..20: mol_type = other DNA
ggattatgcagctattaaaa

SEQ ID NO: 8602 - DNA, 20 bp, synthetic construct
  misc_feature 1..20: note = Description of Artificial Sequence: Synthetic oligonucleotide
  misc_feature 1..20: note = Target: ANGPTL3; (+) strand; PAM type: NRG; PAM sequence: TGG
  source 1..20: mol_type = other DNA
tgcagctattaaaaaggacg

SEQ ID NO: 8603 - DNA, 20 bp, synthetic construct
  misc_feature 1..20: note = Description of Artificial Sequence: Synthetic oligonucleotide
  misc_feature 1..20: note = Target: ANGPTL3; (+) strand; PAM type: NRG; PAM sequence: TAG
  source 1..20: mol_type = other DNA
aaaaggacgtggtaactcta

SEQ ID NO: 8604 - DNA, 20 bp, synthetic construct
  misc_feature 1..20: note = Description of Artificial Sequence: Synthetic oligonucleotide
  misc_feature 1..20: note = Target: ANGPTL3; (+) strand; PAM type: NRG; PAM sequence: TAG
  source 1..20: mol_type = other DNA
ggtaactctatagacattca

SEQ ID NO: 8605 - DNA, 20 bp, synthetic construct
  misc_feature 1..20: note = Description of Artificial Sequence: Synthetic oligonucleotide
  misc_feature 1..20: note = Target: ANGPTL3; (+) strand; PAM type: NRG; PAM sequence: AGG
  source 1..20: mol_type = other DNA
gtaactctatagacattcat

SEQ ID NO: 8606 - DNA, 20 bp, synthetic construct
  misc_feature 1..20: note = Description of Artificial Sequence: Synthetic oligonucleotide
  misc_feature 1..20: note = Target: ANGPTL3; (+) strand; PAM type: NRG; PAM sequence: AAG
  source 1..20: mol_type = other DNA
aaaataaattttaaaatact

SEQ ID NO: 8607 - DNA, 20 bp, synthetic construct
  misc_feature 1..20: note = Description of Artificial Sequence: Synthetic oligonucleotide
  misc_feature 1..20: note = Target: ANGPTL3; (+) strand; PAM type: NRG; PAM sequence: GAG
  source 1..20: mol_type = other DNA
ctgaatgatatatatatcat

SEQ ID NO: 8608 - DNA, 20 bp, synthetic construct
  misc_feature 1..20: note = Description of Artificial Sequence: Synthetic oligonucleotide
  misc_feature 1..20: note = Target: ANGPTL3; (+) strand; PAM type: NRG; PAM sequence: AAG
  source 1..20: mol_type = other DNA
catgagctattatacataac

SEQ ID NO: 8609 - DNA, 20 bp, synthetic construct
  misc_feature 1..20: note = Description of Artificial Sequence: Synthetic oligonucleotide
  misc_feature 1..20: note = Target: ANGPTL3; (+) strand; PAM type: NRG; PAM sequence: TAG
  source 1..20: mol_type = other DNA
gtgttataaaaaattatgtt

SEQ ID NO: 8610 - DNA, 20 bp, synthetic construct
  misc_feature 1..20: note = Description of Artificial Sequence: Synthetic oligonucleotide
  misc_feature 1..20: note = Target: ANGPTL3; (+) strand; PAM type: NRG; PAM sequence: AAG
  source 1..20: mol_type = other DNA
aaattatgtttagtcattca

SEQ ID NO: 8611 - DNA, 20 bp, synthetic construct
  misc_feature 1..20: note = Description of Artificial Sequence: Synthetic oligonucleotide
  misc_feature 1..20: note = Target: ANGPTL3; (+) strand; PAM type: NRG; PAM sequence: AGG
  source 1..20: mol_type = other DNA
aattatgtttagtcattcaa

SEQ ID NO: 8612 - DNA, 20 bp, synthetic construct
  misc_feature 1..20: note = Description of Artificial Sequence: Synthetic oligonucleotide
  misc_feature 1..20: note = Target: ANGPTL3; (+) strand; PAM type: NRG; PAM sequence: GGG
  source 1..20: mol_type = other DNA
attatgtttagtcattcaaa

SEQ ID NO: 8613 - DNA, 20 bp, synthetic construct
  misc_feature 1..20: note = Description of Artificial Sequence: Synthetic oligonucleotide
  misc_feature 1..20: note = Target: ANGPTL3; (+) strand; PAM type: NRG; PAM sequence: TGG
  source 1..20: mol_type = other DNA
gtttagtcattcaaagggtc

SEQ ID NO: 8614 - DNA, 20 bp, synthetic construct
  misc_feature 1..20: note = Description of Artificial Sequence: Synthetic oligonucleotide
  misc_feature 1..20: note = Target: ANGPTL3; (+) strand; PAM type: NRG; PAM sequence: TAG
  source 1..20: mol_type = other DNA
attcaaagggtctggtatga

SEQ ID NO: 8615 - DNA, 20 bp, synthetic construct
  misc_feature 1..20: note = Description of Artificial Sequence: Synthetic oligonucleotide
  misc_feature 1..20: note = Target: ANGPTL3; (+) strand; PAM type: NRG; PAM sequence: TAG
  source 1..20: mol_type = other DNA
tgatagacccaaaatgttaa

SEQ ID NO: 8616 - DNA, 20 bp, synthetic construct
  misc_feature 1..20: note = Description of Artificial Sequence: Synthetic oligonucleotide
  misc_feature 1..20: note = Target: ANGPTL3; (+) strand; PAM type: NRG; PAM sequence: GAG
  source 1..20: mol_type = other DNA
atagacccaaaatgttaata

SEQ ID NO: 8617 - DNA, 20 bp, synthetic construct
  misc_feature 1..20: note = Description of Artificial Sequence: Synthetic oligonucleotide
  misc_feature 1..20: note = Target: ANGPTL3; (+) strand; PAM type: NRG; PAM sequence: GAG
  source 1..20: mol_type = other DNA
cccaaaatgttaatagagtc

SEQ ID NO: 8618 - DNA, 20 bp, synthetic construct
  misc_feature 1..20: note = Description of Artificial Sequence: Synthetic oligonucleotide
  misc_feature 1..20: note = Target: ANGPTL3; (+) strand; PAM type: NRG; PAM sequence: TAG
  source 1..20: mol_type = other DNA
gtcgagatttttatttttta

SEQ ID NO: 8619 - DNA, 20 bp, synthetic construct
  misc_feature 1..20: note = Description of Artificial Sequence: Synthetic oligonucleotide
  misc_feature 1..20: note = Target: ANGPTL3; (+) strand; PAM type: NRG; PAM sequence: AGG
  source 1..20: mol_type = other DNA
tcgagatttttattttttat

SEQ ID NO: 8620 - DNA, 20 bp, synthetic construct
  misc_feature 1..20: note = Description of Artificial Sequence: Synthetic oligonucleotide
  misc_feature 1..20: note = Target: ANGPTL3; (+) strand; PAM type: NRG; PAM sequence: AAG
  source 1..20: mol_type = other DNA
aatacctgaattttcacaat

SEQ ID NO: 8621 - DNA, 20 bp, synthetic construct
  misc_feature 1..20: note = Description of Artificial Sequence: Synthetic oligonucleotide
  misc_feature 1..20: note = Target: ANGPTL3; (+) strand; PAM type: NRG; PAM sequence: TAG
  source 1..20: mol_type = other DNA
actttgcacattaaaaatct

SEQ ID NO: 8622 - DNA, 20 bp, synthetic construct
  misc_feature 1..20: note = Description of Artificial Sequence: Synthetic oligonucleotide
  misc_feature 1..20: note = Target: ANGPTL3; (+) strand; PAM type: NRG; PAM sequence: TGG
  source 1..20: mol_type = other DNA
tgcacattaaaaatcttagc

SEQ ID NO: 8623 - DNA, 20 bp, synthetic construct
  misc_feature 1..20: note = Description of Artificial Sequence: Synthetic oligonucleotide
  misc_feature 1..20: note = Target: ANGPTL3; (+) strand; PAM type: NRG; PAM sequence: GGG
  source 1..20: mol_type = other DNA
gcacattaaaaatcttagct

SEQ ID NO: 8624 - DNA, 20 bp, synthetic construct
  misc_feature 1..20: note = Description of Artificial Sequence: Synthetic oligonucleotide
  misc_feature 1..20: note = Target: ANGPTL3; (+) strand; PAM type: NRG; PAM sequence: TGG
  source 1..20: mol_type = other DNA
ttaaaaatcttagctgggca

SEQ ID NO: 8625 - DNA, 20 bp, synthetic construct
  misc_feature 1..20: note = Description of Artificial Sequence: Synthetic oligonucleotide
  misc_feature 1..20: note = Target: ANGPTL3; (+) strand; PAM type: NRG; PAM sequence: TGG
  source 1..20: mol_type = other DNA
aaaatcttagctgggcatgg

SEQ ID NO: 8626 - DNA, 20 bp, synthetic construct
  misc_feature 1..20: note = Description of Artificial Sequence: Synthetic oligonucleotide
  misc_feature 1..20: note = Target: ANGPTL3; (+) strand; PAM type: NRG; PAM sequence: CAG
  source 1..20: mol_type = other DNA
gtggctcacgcttgtaatcc

SEQ ID NO: 8627 - DNA, 20 bp, synthetic construct
  misc_feature 1..20: note = Description of Artificial Sequence: Synthetic oligonucleotide
  misc_feature 1..20: note = Target: ANGPTL3; (+) strand; PAM type: NRG; PAM sequence: TGG
  source 1..20: mol_type = other DNA
cgcttgtaatcccagcactc

SEQ ID NO: 8628 - DNA, 20 bp, synthetic construct
  misc_feature 1..20: note = Description of Artificial Sequence: Synthetic oligonucleotide
  misc_feature 1..20: note = Target: ANGPTL3; (+) strand; PAM type: NRG; PAM sequence: GGG
  source 1..20: mol_type = other DNA
gcttgtaatcccagcactct

SEQ ID NO: 8629 - DNA, 20 bp, synthetic construct
  misc_feature 1..20: note = Description of Artificial Sequence: Synthetic oligonucleotide
  misc_feature 1..20: note = Target: ANGPTL3; (+) strand; PAM type: NRG; PAM sequence: GAG
  source 1..20: mol_type = other DNA
ttgtaatcccagcactctgg

SEQ ID NO: 8630 - DNA, 20 bp, synthetic construct
  misc_feature 1..20: note = Description of Artificial Sequence: Synthetic oligonucleotide
  misc_feature 1..20: note = Target: ANGPTL3; (+) strand; PAM type: NRG; PAM sequence: AGG
  source 1..20: mol_type = other DNA
tgtaatcccagcactctggg

SEQ ID NO: 8631 - DNA, 20 bp, synthetic construct
  misc_feature 1..20: note = Description of Artificial Sequence: Synthetic oligonucleotide
  misc_feature 1..20: note = Target: ANGPTL3; (+) strand; PAM type: NRG; PAM sequence: AAG
  source 1..20: mol_type = other DNA
tcccagcactctgggaggcc

SEQ ID NO: 8632 - DNA, 20 bp, synthetic construct
  misc_feature 1..20: note = Description of Artificial Sequence: Synthetic oligonucleotide
  misc_feature 1..20: note = Target: ANGPTL3; (+) strand; PAM type: NRG; PAM sequence: AGG
  source 1..20: mol_type = other DNA
cccagcactctgggaggcca

SEQ ID NO: 8633 - DNA, 20 bp, synthetic construct
  misc_feature 1..20: note = Description of Artificial Sequence: Synthetic oligonucleotide
  misc_feature 1..20: note = Target: ANGPTL3; (+) strand; PAM type: NRG; PAM sequence: TAG
  source 1..20: mol_type = other DNA
agcactctgggaggccaagg

SEQ ID NO: 8634 - DNA, 20 bp, synthetic construct
  misc_feature 1..20: note = Description of Artificial Sequence: Synthetic oligonucleotide
  misc_feature 1..20: note = Target: ANGPTL3; (+) strand; PAM type: NRG; PAM sequence: AGG
  source 1..20: mol_type = other DNA
gcactctgggaggccaaggt

SEQ ID NO: 8635 - DNA, 20 bp, synthetic construct
  misc_feature 1..20: note = Description of Artificial Sequence: Synthetic oligonucleotide
  misc_feature 1..20: note = Target: ANGPTL3; (+) strand; PAM type: NRG; PAM sequence: CAG
  source 1..20: mol_type = other DNA
ctctgggaggccaaggtagg

SEQ ID NO: 8636 - DNA, 20 bp, synthetic construct
  misc_feature 1..20: note = Description of Artificial Sequence: Synthetic oligonucleotide
  misc_feature 1..20: note = Target: ANGPTL3; (+) strand; PAM type: NRG; PAM sequence: GAG
  source 1..20: mol_type = other DNA
ccaaggtaggcagatcacct

SEQ ID NO: 8637 - DNA, 20 bp, synthetic construct
  misc_feature 1..20: note = Description of Artificial Sequence: Synthetic oligonucleotide
  misc_feature 1..20: note = Target: ANGPTL3; (+) strand; PAM type: NRG; PAM sequence: AGG
  source 1..20: mol_type = other DNA
caaggtaggcagatcacctg

SEQ ID NO: 8638 - DNA, 20 bp, synthetic construct
  misc_feature 1..20: note = Description of Artificial Sequence: Synthetic oligonucleotide
  misc_feature 1..20: note = Target: ANGPTL3; (+) strand; PAM type: NRG; PAM sequence: CAG
  source 1..20: mol_type = other DNA
gtaggcagatcacctgaggt

SEQ ID NO: 8639 - DNA, 20 bp, synthetic construct
  misc_feature 1..20: note = Description of Artificial Sequence: Synthetic oligonucleotide
  misc_feature 1..20: note = Target: ANGPTL3; (+) strand; PAM type: NRG; PAM sequence: AGG
  source 1..20: mol_type = other DNA
taggcagatcacctgaggtc

SEQ ID NO: 8640 - DNA, 20 bp, synthetic construct
  misc_feature 1..20: note = Description of Artificial Sequence: Synthetic oligonucleotide
  misc_feature 1..20: note = Target: ANGPTL3; (+) strand; PAM type: NRG; PAM sequence: GAG
  source 1..20: mol_type = other DNA
ggcagatcacctgaggtcag

SEQ ID NO: 8641 - DNA, 20 bp, synthetic construct
  misc_feature 1..20: note = Description of Artificial Sequence: Synthetic oligonucleotide
  misc_feature 1..20: note = Target: ANGPTL3; (+) strand; PAM type: NRG; PAM sequence: GAG
  source 1..20: mol_type = other DNA
tcacctgaggtcaggagttc

SEQ ID NO: 8642 - DNA, 20 bp, synthetic construct
  misc_feature 1..20: note = Description of Artificial Sequence: Synthetic oligonucleotide
  misc_feature 1..20: note = Target: ANGPTL3; (+) strand; PAM type: NRG; PAM sequence: CAG
  source 1..20: mol_type = other DNA
tgaggtcaggagttcgagac

SEQ ID NO: 8643 - DNA, 20 bp, synthetic construct
  misc_feature 1..20: note = Description of Artificial Sequence: Synthetic oligonucleotide
  misc_feature 1..20: note = Target: ANGPTL3; (+) strand; PAM type: NRG; PAM sequence: TGG
  source 1..20: mol_type = other DNA
tcaggagttcgagaccagtc

SEQ ID NO: 8644 - DNA, 20 bp, synthetic construct
  misc_feature 1..20: note = Description of Artificial Sequence: Synthetic oligonucleotide
  misc_feature 1..20: note = Target: ANGPTL3; (+) strand; PAM type: NRG; PAM sequence: TGG
  source 1..20: mol_type = other DNA
cgagaccagtctggccaaca

SEQ ID NO: 8645 - DNA, 20 bp, synthetic construct
  misc_feature 1..20: note = Description of Artificial Sequence: Synthetic oligonucleotide
  misc_feature 1..20: note = Target: ANGPTL3; (+) strand; PAM type: NRG; PAM sequence: TAG
  source 1..20: mol_type = other DNA
tctactaaaaatacaaaaat

SEQ ID NO: 8646 - DNA, 20 bp, synthetic construct
  misc_feature 1..20: note = Description of Artificial Sequence: Synthetic oligonucleotide
  misc_feature 1..20: note = Target: ANGPTL3; (+) strand; PAM type: NRG; PAM sequence: CAG
  source 1..20: mol_type = other DNA
ctaaaaatacaaaaattagc

SEQ ID NO: 8647 - DNA, 20 bp, synthetic construct
  misc_feature 1..20: note = Description of Artificial Sequence: Synthetic oligonucleotide
  misc_feature 1..20: note = Target: ANGPTL3; (+) strand; PAM type: NRG; PAM sequence: AGG
  source 1..20: mol_type = other DNA
taaaaatacaaaaattagcc

SEQ ID NO: 8648 - DNA, 20 bp, synthetic construct
  misc_feature 1..20: note = Description of Artificial Sequence: Synthetic oligonucleotide
  misc_feature 1..20: note = Target: ANGPTL3; (+) strand; PAM type: NRG; PAM sequence: TGG
  source 1..20: mol_type = other DNA
atacaaaaattagccaggct

SEQ ID NO: 8649 - DNA, 20 bp, synthetic construct
  misc_feature 1..20: note = Description of Artificial Sequence: Synthetic oligonucleotide
  misc_feature 1..20: note = Target: ANGPTL3; (+) strand; PAM type: NRG; PAM sequence: TGG
  source 1..20: mol_type = other DNA
aaaaattagccaggcttggt

SEQ ID NO: 8650 - DNA, 20 bp, synthetic construct
  misc_feature 1..20: note = Description of Artificial Sequence: Synthetic oligonucleotide
  misc_feature 1..20: note = Target: ANGPTL3; (+) strand; PAM type: NRG; PAM sequence: GGG
  source 1..20: mol_type = other DNA
aaaattagccaggcttggtt

SEQ ID NO: 8651 - DNA, 20 bp, synthetic construct
  misc_feature 1..20: note = Description of Artificial Sequence: Synthetic oligonucleotide
  misc_feature 1..20: note = Target: ANGPTL3; (+) strand; PAM type: NRG; PAM sequence: GGG
  source 1..20: mol_type = other DNA
aaattagccaggcttggttg

SEQ ID NO: 8652 - DNA, 20 bp, synthetic construct
  misc_feature 1..20: note = Description of Artificial Sequence: Synthetic oligonucleotide
  misc_feature 1..20: note = Target: ANGPTL3; (+) strand; PAM type: NRG; PAM sequence: GGG
  source 1..20: mol_type = other DNA
aattagccaggcttggttgg

SEQ ID NO: 8653 - DNA, 20 bp, synthetic construct
  misc_feature 1..20: note = Description of Artificial Sequence: Synthetic oligonucleotide
  misc_feature 1..20: note = Target: ANGPTL3; (+) strand; PAM type: NRG; PAM sequence: CAG
  source 1..20: mol_type = other DNA
gttgggggtgcctgtaattc

SEQ ID NO: 8654 - DNA, 20 bp, synthetic construct
  misc_feature 1..20: note = Description of Artificial Sequence: Synthetic oligonucleotide
  misc_feature 1..20: note = Target: ANGPTL3; (+) strand; PAM type: NRG; PAM sequence: CGG
  source 1..20: mol_type = other DNA
tgcctgtaattccagatact

SEQ ID NO: 8655 - DNA, 20 bp, synthetic construct
  misc_feature 1..20: note = Description of Artificial Sequence: Synthetic oligonucleotide
  misc_feature 1..20: note = Target: ANGPTL3; (+) strand; PAM type: NRG; PAM sequence: GGG
  source 1..20: mol_type = other DNA
gcctgtaattccagatactc

SEQ ID NO: 8656 - DNA, 20 bp, synthetic construct
  misc_feature 1..20: note = Description of Artificial Sequence: Synthetic oligonucleotide
  misc_feature 1..20: note = Target: ANGPTL3; (+) strand; PAM type: NRG; PAM sequence: AAG
  source 1..20: mol_type = other DNA
tgtaattccagatactcggg

SEQ ID NO: 8657 - DNA, 20 bp, synthetic construct
  misc_feature 1..20: note = Description of Artificial Sequence: Synthetic oligonucleotide
  misc_feature 1..20: note = Target: ANGPTL3; (+) strand; PAM type: NRG; PAM sequence: GAG
  source 1..20: mol_type = other DNA
ttccagatactcgggaagct

SEQ ID NO: 8658 - DNA, 20 bp, synthetic construct
  misc_feature 1..20: note = Description of Artificial Sequence: Synthetic oligonucleotide
  misc_feature 1..20: note = Target: ANGPTL3; (+) strand; PAM type: NRG; PAM sequence: CAG
  source 1..20: mol_type = other DNA
agatactcgggaagctgaga

SEQ ID NO: 8659 - DNA, 20 bp, synthetic construct
  misc_feature 1..20: note = Description of Artificial Sequence: Synthetic oligonucleotide
  misc_feature 1..20: note = Target: ANGPTL3; (+) strand; PAM type: NRG; PAM sequence: AGG
  source 1..20: mol_type = other DNA
gatactcgggaagctgagac

SEQ ID NO: 8660 - DNA, 20 bp, synthetic construct
  misc_feature 1..20: note = Description of Artificial Sequence: Synthetic oligonucleotide
  misc_feature 1..20: note = Target: ANGPTL3; (+) strand; PAM type: NRG; PAM sequence: GAG
  source 1..20: mol_type = other DNA
tactcgggaagctgagacag

SEQ ID NO: 8661 - DNA, 20 bp, synthetic construct
  misc_feature 1..20: note = Description of Artificial Sequence: Synthetic oligonucleotide
  misc_feature 1..20: note = Target: ANGPTL3; (+) strand; PAM type: NRG; PAM sequence: CAG
  source 1..20: mol_type = other DNA
acaggagaatcgcttgaacc

SEQ ID NO: 8662 - DNA, 20 bp, synthetic construct
  misc_feature 1..20: note = Description of Artificial Sequence: Synthetic oligonucleotide
  misc_feature 1..20: note = Target: ANGPTL3; (+) strand; PAM type: NRG; PAM sequence: AGG
  source 1..20: mol_type = other DNA
caggagaatcgcttgaaccc

SEQ ID NO: 8663 - DNA, 20 bp, synthetic construct
  misc_feature 1..20: note = Description of Artificial Sequence: Synthetic oligonucleotide
  misc_feature 1..20: note = Target: ANGPTL3; (+) strand; PAM type: NRG; PAM sequence: GAG
  source 1..20: mol_type = other DNA
ggagaatcgcttgaacccag

SEQ ID NO: 8664 - DNA, 20 bp, synthetic construct
  misc_feature 1..20: note = Description of Artificial Sequence: Synthetic oligonucleotide
  misc_feature 1..20: note = Target: ANGPTL3; (+) strand; PAM type: NRG; PAM sequence: AGG
  source 1..20: mol_type = other DNA
gagaatcgcttgaacccagg

SEQ ID NO: 8665 - DNA, 20 bp, synthetic construct
  misc_feature 1..20: note = Description of Artificial Sequence: Synthetic oligonucleotide
  misc_feature 1..20: note = Target: ANGPTL3; (+) strand; PAM type: NRG; PAM sequence: GGG
  source 1..20: mol_type = other DNA
agaatcgcttgaacccagga

SEQ ID NO: 8666 - DNA, 20 bp, synthetic construct
  misc_feature 1..20: note = Description of Artificial Sequence: Synthetic oligonucleotide
  misc_feature 1..20: note = Target: ANGPTL3; (+) strand; PAM type: NRG; PAM sequence: GGG
  source 1..20: mol_type = other DNA
gaatcgcttgaacccaggag

SEQ ID NO: 8667 - DNA, 20 bp, synthetic construct
  misc_feature 1..20: note = Description of Artificial Sequence: Synthetic oligonucleotide
  misc_feature 1..20: note = Target: ANGPTL3; (+) strand; PAM type: NRG; PAM sequence: GGG
  source 1..20: mol_type = other DNA
aatcgcttgaacccaggagg

SEQ ID NO: 8668 - DNA, 20 bp, synthetic construct
  misc_feature 1..20: note = Description of Artificial Sequence: Synthetic oligonucleotide
  misc_feature 1..20: note = Target: ANGPTL3; (+) strand; PAM type: NRG; PAM sequence: AAG
  source 1..20: mol_type = other DNA
cgcttgaacccaggaggggg

SEQ ID NO: 8669 - DNA, 20 bp, synthetic construct
  misc_feature 1..20: note = Description of Artificial Sequence: Synthetic oligonucleotide
  misc_feature 1..20: note = Target: ANGPTL3; (+) strand; PAM type: NRG; PAM sequence: CAG
  source 1..20: mol_type = other DNA
aacccaggagggggaagttg

SEQ ID NO: 8670 - DNA, 20 bp, synthetic construct
  misc_feature 1..20: note = Description of Artificial Sequence: Synthetic oligonucleotide
  misc_feature 1..20: note = Target: ANGPTL3; (+) strand; PAM type: NRG; PAM sequence: GAG
  source 1..20: mol_type = other DNA
caggagggggaagttgcagt

SEQ ID NO: 8671 - DNA, 20 bp, synthetic construct
  misc_feature 1..20: note = Description of Artificial Sequence: Synthetic oligonucleotide
  misc_feature 1..20: note = Target: ANGPTL3; (+) strand; PAM type: NRG; PAM sequence: GAG
  source 1..20: mol_type = other DNA
gggggaagttgcagtgagct

SEQ ID NO: 8672 - DNA, 20 bp, synthetic construct
  misc_feature 1..20: note = Description of Artificial Sequence: Synthetic oligonucleotide
  misc_feature 1..20: note = Target: ANGPTL3; (+) strand; PAM type: NRG; PAM sequence: CAG
  source 1..20: mol_type = other DNA
gagatcacgacgctgcactc

SEQ ID NO: 8673 - DNA, 20 bp, synthetic construct
  misc_feature 1..20: note = Description of Artificial Sequence: Synthetic oligonucleotide
  misc_feature 1..20: note = Target: ANGPTL3; (+) strand; PAM type: NRG; PAM sequence: TGG
  source 1..20: mol_type = other DNA
cacgacgctgcactccagcc

SEQ ID NO: 8674 - DNA, 20 bp, synthetic construct
  misc_feature 1..20: note = Description of Artificial Sequence: Synthetic oligonucleotide
  misc_feature 1..20: note = Target: ANGPTL3; (+) strand; PAM type: NRG; PAM sequence: GGG
  source 1..20: mol_type = other DNA
acgacgctgcactccagcct

SEQ ID NO: 8675 - DNA, 20 bp, synthetic construct
  misc_feature 1..20: note = Description of Artificial Sequence: Synthetic oligonucleotide
  misc_feature 1..20: note = Target: ANGPTL3; (+) strand; PAM type: NRG; PAM sequence: AAG
  source 1..20: mol_type = other DNA
gcactccagcctgggcaaca

SEQ ID NO: 8676 - DNA, 20 bp, synthetic construct
  misc_feature 1..20: note = Description of Artificial Sequence: Synthetic oligonucleotide
  misc_feature 1..20: note = Target: ANGPTL3; (+) strand; PAM type: NRG; PAM sequence: GAG
  source 1..20: mol_type = other DNA
actccagcctgggcaacaaa

SEQ ID NO: 8677 - DNA, 20 bp, synthetic construct
  misc_feature 1..20: note = Description of Artificial Sequence: Synthetic oligonucleotide
  misc_feature 1..20: note = Target: ANGPTL3; (+) strand; PAM type: NRG; PAM sequence: AAG
  source 1..20: mol_type = other DNA
ctccgtctcaaaaataaata

SEQ ID NO: 8678 - DNA, 20 bp, synthetic construct
  misc_feature 1..20: note = Description of Artificial Sequence: Synthetic oligonucleotide
  misc_feature 1..20: note = Target: ANGPTL3; (+) strand; PAM type: NRG; PAM sequence: AAG
  source 1..20: mol_type = other DNA
aaaaaatctttacatgtcca

SEQ ID NO: 8679 - DNA, 20 bp, synthetic construct
  misc_feature 1..20: note = Description of Artificial Sequence: Synthetic oligonucleotide
  misc_feature 1..20: note = Target: ANGPTL3; (+) strand; PAM type: NRG; PAM sequence: CGG
  source 1..20: mol_type = other DNA
tctttacatgtccaaagata

SEQ ID NO: 8680 - DNA, 20 bp, synthetic construct
  misc_feature 1..20: note = Description of Artificial Sequence: Synthetic oligonucleotide
  misc_feature 1..20: note = Target: ANGPTL3; (+) strand; PAM type: NRG; PAM sequence: TAG
  source 1..20: mol_type = other DNA
tataaaacttaacatgttaa

SEQ ID NO: 8681 - DNA, 20 bp, synthetic construct
  misc_feature 1..20: note = Description of Artificial Sequence: Synthetic oligonucleotide
  misc_feature 1..20: note = Target: ANGPTL3; (+) strand; PAM type: NRG; PAM sequence: CAG
  source 1..20: mol_type = other DNA
ttaatagtgaacacacaaaa

SEQ ID NO: 8682 - DNA, 20 bp, synthetic construct
  misc_feature 1..20: note = Description of Artificial Sequence: Synthetic oligonucleotide
  misc_feature 1..20: note = Target: ANGPTL3; (+) strand; PAM type: NRG; PAM sequence: AAG
  source 1..20: mol_type = other DNA
tagtgaacacacaaaacagt

SEQ ID NO: 8683 - DNA, 20 bp, synthetic construct
  misc_feature 1..20: note = Description of Artificial Sequence: Synthetic oligonucleotide
  misc_feature 1..20: note = Target: ANGPTL3; (+) strand; PAM type: NRG; PAM sequence: TAG
  source 1..20: mol_type = other DNA
gaacacacaaaacagtaaga

SEQ ID NO: 8684 - DNA, 20 bp, synthetic construct
  misc_feature 1..20: note = Description of Artificial Sequence: Synthetic oligonucleotide
  misc_feature 1..20: note = Target: ANGPTL3; (+) strand; PAM type: NRG; PAM sequence: AAG
  source 1..20: mol_type = other DNA
tagataaaattattccttca

SEQ ID NO: 8685 - DNA, 20 bp, synthetic construct
  misc_feature 1..20: note = Description of Artificial Sequence: Synthetic oligonucleotide
  misc_feature 1..20: note = Target: ANGPTL3; (+) strand; PAM type: NRG; PAM sequence: TGG
  source 1..20: mol_type = other DNA
ttcaaagctcacttaacctc

SEQ ID NO: 8686 - DNA, 20 bp, synthetic construct
  misc_feature 1..20: note = Description of Artificial Sequence: Synthetic oligonucleotide
  misc_feature 1..20: note = Target: ANGPTL3; (+) strand; PAM type: NRG; PAM sequence: AAG
  source 1..20: mol_type = other DNA
ctggatctacactgtccaaa

SEQ ID NO: 8687 - DNA, 20 bp, synthetic construct
  misc_feature 1..20: note = Description of Artificial Sequence: Synthetic oligonucleotide
  misc_feature 1..20: note = Target: ANGPTL3; (+) strand; PAM type: NRG; PAM sequence: CGG
  source 1..20: mol_type = other DNA
atctacactgtccaaaaaga

SEQ ID NO: 8688 - DNA, 20 bp, synthetic construct
  misc_feature 1..20: note = Description of Artificial Sequence: Synthetic oligonucleotide
  misc_feature 1..20: note = Target: ANGPTL3; (+) strand; PAM type: NRG; PAM sequence: GAG
  source 1..20: mol_type = other DNA
gtccaaaaagacggtctaat

SEQ ID NO: 8689 - DNA, 20 bp, synthetic construct
  misc_feature 1..20: note = Description of Artificial Sequence: Synthetic oligonucleotide
  misc_feature 1..20: note = Target: ANGPTL3; (+) strand; PAM type: NRG; PAM sequence: GAG
  source 1..20: mol_type = other DNA
gacggtctaatgagacaatt

SEQ ID NO: 8690 - DNA, 20 bp, synthetic construct
  misc_feature 1..20: note = Description of Artificial Sequence: Synthetic oligonucleotide
  misc_feature 1..20: note = Target: ANGPTL3; (+) strand; PAM type: NRG; PAM sequence: TAG
  source 1..20: mol_type = other DNA
tgagacaattgagcacttga

SEQ ID NO: 8691 - DNA, 20 bp, synthetic construct
  misc_feature 1..20: note = Description of Artificial Sequence: Synthetic oligonucleotide
  misc_feature 1..20: note = Target: ANGPTL3; (+) strand; PAM type: NRG; PAM sequence: AGG
  source 1..20: mol_type = other DNA
gagacaattgagcacttgat

SEQ ID NO: 8692 - DNA, 20 bp, synthetic construct
  misc_feature 1..20: note = Description of Artificial Sequence: Synthetic oligonucleotide
  misc_feature 1..20: note = Target: ANGPTL3; (+) strand; PAM type: NRG; PAM sequence: GAG
  source 1..20: mol_type = other DNA
caattgagcacttgataggt

SEQ ID NO: 8693 - DNA, 20 bp, synthetic construct
  misc_feature 1..20: note = Description of Artificial Sequence: Synthetic oligonucleotide
  misc_feature 1..20: note = Target: ANGPTL3; (+) strand; PAM type: NRG; PAM sequence: TGG
  source 1..20: mol_type = other DNA
ttgagcacttgataggtgag

SEQ ID NO: 8694 - DNA, 20 bp, synthetic construct
  misc_feature 1..20: note = Description of Artificial Sequence: Synthetic oligonucleotide
  misc_feature 1..20: note = Target: ANGPTL3; (+) strand; PAM type: NRG; PAM sequence: GAG
  source 1..20: mol_type = other DNA
ataggtgagtggttctaact

SEQ ID NO: 8695 - DNA, 20 bp, synthetic construct
  misc_feature 1..20: note = Description of Artificial Sequence: Synthetic oligonucleotide
  misc_feature 1..20: note = Target: ANGPTL3; (+) strand; PAM type: NRG; PAM sequence: CAG
  source 1..20: mol_type = other DNA
ttctaactgagatatgttct

SEQ ID NO: 8696 - DNA, 20 bp, synthetic construct
  misc_feature 1..20: note = Description of Artificial Sequence: Synthetic oligonucleotide
  misc_feature 1..20: note = Target: ANGPTL3; (+) strand; PAM type: NRG; PAM sequence: TAG
  source 1..20: mol_type = other DNA
tctcagtataaaacatacaa

SEQ ID NO: 8697 - DNA, 20 bp, synthetic construct
  misc_feature 1..20: note = Description of Artificial Sequence: Synthetic oligonucleotide
  misc_feature 1..20: note = Target: ANGPTL3; (+) strand; PAM type: NRG; PAM sequence: AGG
  source 1..20: mol_type = other DNA
ctcagtataaaacatacaat

SEQ ID NO: 8698 - DNA, 20 bp, synthetic construct
  misc_feature 1..20: note = Description of Artificial Sequence: Synthetic oligonucleotide
  misc_feature 1..20: note = Target: ANGPTL3; (+) strand; PAM type: NRG; PAM sequence: TAG
  source 1..20: mol_type = other DNA
aattaaaaaacaaactattg

SEQ ID NO: 8699 - DNA, 20 bp, synthetic construct
  misc_feature 1..20: note = Description of Artificial Sequence: Synthetic oligonucleotide
  misc_feature 1..20: note = Target: ANGPTL3; (+) strand; PAM type: NRG; PAM sequence: AAG
  source 1..20: mol_type = other DNA
aacaaactattgtagttaaa

SEQ ID NO: 8700 - DNA, 20 bp, synthetic construct
  misc_feature 1..20: note = Description of Artificial Sequence: Synthetic oligonucleotide
  misc_feature 1..20: note = Target: ANGPTL3; (+) strand; PAM type: NRG; PAM sequence: AGG
  source 1..20: mol_type = other DNA
acaaactattgtagttaaaa

SEQ ID NO: 8701 - DNA, 20 bp, synthetic construct
  misc_feature 1..20: note = Description of Artificial Sequence: Synthetic oligonucleotide
  misc_feature 1..20: note = Target: ANGPTL3; (+) strand; PAM type: NRG; PAM sequence: TAG
  source 1..20: mol_type = other DNA
gtagttaaaaaggaaaaaat

SEQ ID NO: 8702 - DNA, 20 bp, synthetic construct
  misc_feature 1..20: note = Description of Artificial Sequence: Synthetic oligonucleotide
  misc_feature 1..20: note = Target: ANGPTL3; (+) strand; PAM type: NRG; PAM sequence: GAG
  source 1..20: mol_type = other DNA
agttaaaaaggaaaaaatta

SEQ ID NO: 8703 - DNA, 20 bp, synthetic construct
  misc_feature 1..20: note = Description of Artificial Sequence: Synthetic oligonucleotide
  misc_feature 1..20: note = Target: ANGPTL3; (+) strand; PAM type: NRG; PAM sequence: AAG
  source 1..20: mol_type = other DNA
attagagatactatgtaaaa

SEQ ID NO: 8704 - DNA, 20 bp, synthetic construct
  misc_feature 1..20: note = Description of Artificial Sequence: Synthetic oligonucleotide
  misc_feature 1..20: note = Target: ANGPTL3; (+) strand; PAM type: NRG; PAM sequence: GAG
  source 1..20: mol_type = other DNA
tagagatactatgtaaaaaa

SEQ ID NO: 8705 - DNA, 20 bp, synthetic construct
  misc_feature 1..20: note = Description of Artificial Sequence: Synthetic oligonucleotide
  misc_feature 1..20: note = Target: ANGPTL3; (+) strand; PAM type: NRG; PAM sequence: AAG
  source 1..20: mol_type = other DNA
ataccttgtattttatttga

SEQ ID NO: 8706 - DNA, 20 bp, synthetic construct
  misc_feature 1..20: note = Description of Artificial Sequence: Synthetic oligonucleotide
  misc_feature 1..20: note = Target: ANGPTL3; (+) strand; PAM type: NRG; PAM sequence: AAG
  source 1..20: mol_type = other DNA
tttgaaagacatatctccat

SEQ ID NO: 8707 - DNA, 20 bp, synthetic construct
  misc_feature 1..20: note = Description of Artificial Sequence: Synthetic oligonucleotide
  misc_feature 1..20: note = Target: ANGPTL3; (+) strand; PAM type: NRG; PAM sequence: TAG
  source 1..20: mol_type = other DNA
taagattacacaacctcgtg

SEQ ID NO: 8708 - DNA, 20 bp, synthetic construct
  misc_feature 1..20: note = Description of Artificial Sequence: Synthetic oligonucleotide
  misc_feature 1..20: note = Target: ANGPTL3; (+) strand; PAM type: NRG; PAM sequence: AGG
  source 1..20: mol_type = other DNA
aagattacacaacctcgtgt

SEQ ID NO: 8709 - DNA, 20 bp, synthetic construct
  misc_feature 1..20: note = Description of Artificial Sequence: Synthetic oligonucleotide
  misc_feature 1..20: note = Target: ANGPTL3; (+) strand; PAM type: NRG; PAM sequence: AAG
  source 1..20: mol_type = other DNA
acacaacctcgtgtaggata

SEQ ID NO: 8710 - DNA, 20 bp, synthetic construct
  misc_feature 1..20: note = Description of Artificial Sequence: Synthetic oligonucleotide
  misc_feature 1..20: note = Target: ANGPTL3; (+) strand; PAM type: NRG; PAM sequence: AGG
  source 1..20: mol_type = other DNA
cacaacctcgtgtaggataa

SEQ ID NO: 8711 - DNA, 20 bp, synthetic construct
  misc_feature 1..20: note = Description of Artificial Sequence: Synthetic oligonucleotide
  misc_feature 1..20: note = Target: ANGPTL3; (+) strand; PAM type: NRG; PAM sequence: TGG
  source 1..20: mol_type = other DNA
ataaaggactttgctttgct

SEQ ID NO: 8712 - DNA, 20 bp, synthetic construct
  misc_feature 1..20: note = Description of Artificial Sequence: Synthetic oligonucleotide
  misc_feature 1..20: note = Target: ANGPTL3; (+) strand; PAM type: NRG; PAM sequence: TAG
  source 1..20: mol_type = other DNA
tgcttggaatttaaacaatt

SEQ ID NO: 8713 - DNA, 20 bp, synthetic construct
  misc_feature 1..20: note = Description of Artificial Sequence: Synthetic oligonucleotide
  misc_feature 1..20: note = Target: ANGPTL3; (+) strand; PAM type: NRG; PAM sequence: AGG
  source 1..20: mol_type = other DNA
gcttggaatttaaacaattt

SEQ ID NO: 8714 - DNA, 20 bp, synthetic construct
  misc_feature 1..20: note = Description of Artificial Sequence: Synthetic oligonucleotide
  misc_feature 1..20: note = Target: ANGPTL3; (+) strand; PAM type: NRG; PAM sequence: TAG
  source 1..20: mol_type = other DNA
aaatgtcctaaaattctctg

SEQ ID NO: 8715 - DNA, 20 bp, synthetic construct
  misc_feature 1..20: note = Description of Artificial Sequence: Synthetic oligonucleotide
  misc_feature 1..20: note = Target: ANGPTL3; (+) strand; PAM type: NRG; PAM sequence: AAG
  source 1..20: mol_type = other DNA
tcctaaaattctctgtagct

SEQ ID NO: 8716 - DNA, 20 bp, synthetic construct
  misc_feature 1..20: note = Description of Artificial Sequence: Synthetic oligonucleotide
  misc_feature 1..20: note = Target: ANGPTL3; (+) strand; PAM type: NRG; PAM sequence: TGG
  source 1..20: mol_type = other DNA
tagctaagaaatttttatat

SEQ ID NO: 8717 - DNA, 20 bp, synthetic construct
  misc_feature 1..20: note = Description of Artificial Sequence: Synthetic oligonucleotide
  misc_feature 1..20: note = Target: ANGPTL3; (+) strand; PAM type: NRG; PAM sequence: TAG
  source 1..20: mol_type = other DNA
gaaatttttatattggttcc

SEQ ID NO: 8718 - DNA, 20 bp, synthetic construct
  misc_feature 1..20: note = Description of Artificial Sequence: Synthetic oligonucleotide
  misc_feature 1..20: note = Target: ANGPTL3; (+) strand; PAM type: NRG; PAM sequence: AGG
  source 1..20: mol_type = other DNA
aaatttttatattggttcct

SEQ ID NO: 8719 - DNA, 20 bp, synthetic construct
  misc_feature 1..20: note = Description of Artificial Sequence: Synthetic oligonucleotide
  misc_feature 1..20: note = Target: ANGPTL3; (+) strand; PAM type: NRG; PAM sequence: TAG
  source 1..20: mol_type = other DNA
ttatattggttcctaggaac

SEQ ID NO: 8720 - DNA, 20 bp, synthetic construct
  misc_feature 1..20: note = Description of Artificial Sequence: Synthetic oligonucleotide
  misc_feature 1..20: note = Target: ANGPTL3; (+) strand; PAM type: NRG; PAM sequence: AGG
  source 1..20: mol_type = other DNA
tatattggttcctaggaact

SEQ ID NO: 8721 - DNA, 20 bp, synthetic construct
  misc_feature 1..20: note = Description of Artificial Sequence: Synthetic oligonucleotide
  misc_feature 1..20: note = Target: ANGPTL3; (+) strand; PAM type: NRG; PAM sequence: TAG
  source 1..20: mol_type = other DNA
ggaactaggaatccttaaat

SEQ ID NO: 8722 - DNA, 20 bp, synthetic construct
  misc_feature 1..20: note = Description of Artificial Sequence: Synthetic oligonucleotide
  misc_feature 1..20: note = Target: ANGPTL3; (+) strand; PAM type: NRG; PAM sequence: AGG
  source 1..20: mol_type = other DNA
gaactaggaatccttaaatt

SEQ ID NO: 8723 - DNA, 20 bp, synthetic construct
  misc_feature 1..20: note = Description of Artificial Sequence: Synthetic oligonucleotide
  misc_feature 1..20: note = Target: ANGPTL3; (+) strand; PAM type: NRG; PAM sequence: AAG
  source 1..20: mol_type = other DNA
taggccctacatttgcttac

SEQ ID NO: 8724 - DNA, 20 bp, synthetic construct
  misc_feature 1..20: note = Description of Artificial Sequence: Synthetic oligonucleotide
  misc_feature 1..20: note = Target: ANGPTL3; (+) strand; PAM type: NRG; PAM sequence: TGG
  source 1..20: mol_type = other DNA
gcttacaagtttattttcct

SEQ ID NO: 8725 - DNA, 20 bp, synthetic construct
  misc_feature 1..20: note = Description of Artificial Sequence: Synthetic oligonucleotide
  misc_feature 1..20: note = Target: ANGPTL3; (+) strand; PAM type: NRG; PAM sequence: TAG
  source 1..20: mol_type = other DNA
ttccttggcataaaattttt

SEQ ID NO: 8726 - DNA, 20 bp, synthetic construct
  misc_feature 1..20: note = Description of Artificial Sequence: Synthetic oligonucleotide
  misc_feature 1..20: note = Target: ANGPTL3; (+) strand; PAM type: NRG; PAM sequence: TGG
  source 1..20: mol_type = other DNA
ttttttagtttttacattac

SEQ ID NO: 8727 - DNA, 20 bp, synthetic construct
  misc_feature 1..20: note = Description of Artificial Sequence: Synthetic oligonucleotide
  misc_feature 1..20: note = Target: ANGPTL3; (+) strand; PAM type: NRG; PAM sequence: CAG
  source 1..20: mol_type = other DNA
cattactggttatatttgat

SEQ ID NO: 8728 - DNA, 20 bp, synthetic construct
  misc_feature 1..20: note = Description of Artificial Sequence: Synthetic oligonucleotide
  misc_feature 1..20: note = Target: ANGPTL3; (+) strand; PAM type: NRG; PAM sequence: AGG
  source 1..20: mol_type = other DNA
attactggttatatttgatc

SEQ ID NO: 8729 - DNA, 20 bp, synthetic construct
  misc_feature 1..20: note = Description of Artificial Sequence: Synthetic oligonucleotide
  misc_feature 1..20: note = Target: ANGPTL3; (+) strand; PAM type: NRG; PAM sequence: GGG
  source 1..20: mol_type = other DNA
ttactggttatatttgatca

SEQ ID NO: 8730 - DNA, 20 bp, synthetic construct
  misc_feature 1..20: note = Description of Artificial Sequence: Synthetic oligonucleotide
  misc_feature 1..20: note = Target: ANGPTL3; (+) strand; PAM type: NRG; PAM sequence: TAG
  source 1..20: mol_type = other DNA
tgatcagggttctatttaaa

SEQ ID NO: 8731 - DNA, 20 bp, synthetic construct
  misc_feature 1..20: note = Description of Artificial Sequence: Synthetic oligonucleotide
  misc_feature 1..20: note = Target: ANGPTL3; (+) strand; PAM type: NRG; PAM sequence: AGG
  source 1..20: mol_type = other DNA
gatcagggttctatttaaat

SEQ ID NO: 8732 - DNA, 20 bp, synthetic construct
  misc_feature 1..20: note = Description of Artificial Sequence: Synthetic oligonucleotide
  misc_feature 1..20: note = Target: ANGPTL3; (+) strand; PAM type: NRG; PAM sequence: AAG
  source 1..20: mol_type = other DNA
ggttctatttaaataggcac

SEQ ID NO: 8733 - DNA, 20 bp, synthetic construct
  misc_feature 1..20: note = Description of Artificial Sequence: Synthetic oligonucleotide
  misc_feature 1..20: note = Target: ANGPTL3; (+) strand; PAM type: NRG; PAM sequence: AAG
  source 1..20: mol_type = other DNA
atttaaataggcacaagttc

SEQ ID NO: 8734 - DNA, 20 bp, synthetic construct
  misc_feature 1..20: note = Description of Artificial Sequence: Synthetic oligonucleotide
  misc_feature 1..20: note = Target: ANGPTL3; (+) strand; PAM type: NRG; PAM sequence: AAG
  source 1..20: mol_type = other DNA
aataggcacaagttcaagca

SEQ ID NO: 8735 - DNA, 20 bp, synthetic construct
  misc_feature 1..20: note = Description of Artificial Sequence: Synthetic oligonucleotide
  misc_feature 1..20: note = Target: ANGPTL3; (+) strand; PAM type: NRG; PAM sequence: CAG
  source 1..20: mol_type = other DNA
gcacaagttcaagcaaagat

SEQ ID NO: 8736 - DNA, 20 bp, synthetic construct
  misc_feature 1..20: note = Description of Artificial Sequence: Synthetic oligonucleotide
  misc_feature 1..20: note = Target: ANGPTL3; (+) strand; PAM type: NRG; PAM sequence: TAG
  source 1..20: mol_type = other DNA
caaagatcagattctgcttt

SEQ ID NO: 8737 - DNA, 20 bp, synthetic construct
  misc_feature 1..20: note = Description of Artificial Sequence: Synthetic oligonucleotide
  misc_feature 1..20: note = Target: ANGPTL3; (+) strand; PAM type: NRG; PAM sequence: CAG
  source 1..20: mol_type = other DNA
agatcagattctgcttttag

SEQ ID NO: 8738 - DNA, 20 bp, synthetic construct
  misc_feature 1..20: note = Description of Artificial Sequence: Synthetic oligonucleotide
  misc_feature 1..20: note = Target: ANGPTL3; (+) strand; PAM type: NRG; PAM sequence: CAG
  source 1..20: mol_type = other DNA
tgcttttagcagtgtgtact

SEQ ID NO: 8739 - DNA, 20 bp, synthetic construct
  misc_feature 1..20: note = Description of Artificial Sequence: Synthetic oligonucleotide
  misc_feature 1..20: note = Target: ANGPTL3; (+) strand; PAM type: NRG; PAM sequence: CAG
  source 1..20: mol_type = other DNA
tttagcagtgtgtactcaga

SEQ ID NO: 8740 - DNA, 20 bp, synthetic construct
  misc_feature 1..20: note = Description of Artificial Sequence: Synthetic oligonucleotide
  misc_feature 1..20: note = Target: ANGPTL3; (+) strand; PAM type: NRG; PAM sequence: AGG
  source 1..20: mol_type = other DNA
ttagcagtgtgtactcagac

SEQ ID NO: 8741 - DNA, 20 bp, synthetic construct
  misc_feature 1..20: note = Description of Artificial Sequence: Synthetic oligonucleotide
  misc_feature 1..20: note = Target: ANGPTL3; (+) strand; PAM type: NRG; PAM sequence: AAG
  source 1..20: mol_type = other DNA
gcagtgtgtactcagacagg

SEQ ID NO: 8742 - DNA, 20 bp, synthetic construct
  misc_feature 1..20: note = Description of Artificial Sequence: Synthetic oligonucleotide
  misc_feature 1..20: note = Target: ANGPTL3; (+) strand; PAM type: NRG; PAM sequence: AAG
  source 1..20: mol_type = other DNA
actcagacaggaagtattaa

SEQ ID NO: 8743 - DNA, 20 bp, synthetic construct
  misc_feature 1..20: note = Description of Artificial Sequence: Synthetic oligonucleotide
  misc_feature 1..20: note = Target: ANGPTL3; (+) strand; PAM type: NRG; PAM sequence: AGG
  source 1..20: mol_type = other DNA
ctcagacaggaagtattaaa

SEQ ID NO: 8744 - DNA, 20 bp, synthetic construct
  misc_feature 1..20: note = Description of Artificial Sequence: Synthetic oligonucleotide
  misc_feature 1..20: note = Target: ANGPTL3; (+) strand; PAM type: NRG; PAM sequence: CAG
  source 1..20: mol_type = other DNA
agacaggaagtattaaaagg

SEQ ID NO: 8745 - DNA, 20 bp, synthetic construct
  misc_feature 1..20: note = Description of Artificial Sequence: Synthetic oligonucleotide
  misc_feature 1..20: note = Target: ANGPTL3; (+) strand; PAM type: NRG; PAM sequence: AGG
  source 1..20: mol_type = other DNA
gacaggaagtattaaaaggc

SEQ ID NO: 8746 - DNA, 20 bp, synthetic construct
  misc_feature 1..20: note = Description of Artificial Sequence: Synthetic oligonucleotide
  misc_feature 1..20: note = Target: ANGPTL3; (+) strand; PAM type: NRG; PAM sequence: CAG
  source 1..20: mol_type = other DNA
aggaagtattaaaaggcagg

SEQ ID NO: 8747 - DNA, 20 bp, synthetic construct
  misc_feature 1..20: note = Description of Artificial Sequence: Synthetic oligonucleotide
  misc_feature 1..20: note = Target: ANGPTL3; (+) strand; PAM type: NRG; PAM sequence: CAG
  source 1..20: mol_type = other DNA
cccacgttgaaatgcttctg

SEQ ID NO: 8748 - DNA, 20 bp, synthetic construct
  misc_feature 1..20: note = Description of Artificial Sequence: Synthetic oligonucleotide
  misc_feature 1..20: note = Target: ANGPTL3; (+) strand; PAM type: NRG; PAM sequence: TAG
  source 1..20: mol_type = other DNA
atgcttctgcagtttataat

SEQ ID NO: 8749 - DNA, 20 bp, synthetic construct
  misc_feature 1..20: note = Description of Artificial Sequence: Synthetic oligonucleotide
  misc_feature 1..20: note = Target: ANGPTL3; (+) strand; PAM type: NRG; PAM sequence: AGG
  source 1..20: mol_type = other DNA
tgcttctgcagtttataatt

SEQ ID NO: 8750 - DNA, 20 bp, synthetic construct
  misc_feature 1..20: note = Description of Artificial Sequence: Synthetic oligonucleotide
  misc_feature 1..20: note = Target: ANGPTL3; (+) strand; PAM type: NRG; PAM sequence: AAG
  source 1..20: mol_type = other DNA
aatgctgttcaaattactat

SEQ ID NO: 8751 - DNA, 20 bp, synthetic construct
  misc_feature 1..20: note = Description of Artificial Sequence: Synthetic oligonucleotide
  misc_feature 1..20: note = Target: ANGPTL3; (+) strand; PAM type: NRG; PAM sequence: CAG
  source 1..20: mol_type = other DNA
aaattactataagaattata

SEQ ID NO: 8752 - DNA, 20 bp, synthetic construct
  misc_feature 1..20: note = Description of Artificial Sequence: Synthetic oligonucleotide
  misc_feature 1..20: note = Target: ANGPTL3; (+) strand; PAM type: NRG; PAM sequence: AAG
  source 1..20: mol_type = other DNA
attatacagatatttatacc

SEQ ID NO: 8753 - DNA, 20 bp, synthetic construct
  misc_feature 1..20: note = Description of Artificial Sequence: Synthetic oligonucleotide
  misc_feature 1..20: note = Target: ANGPTL3; (+) strand; PAM type: NRG; PAM sequence: GAG
  source 1..20: mol_type = other DNA
tatacagatatttataccaa

SEQ ID NO: 8754 - DNA, 20 bp, synthetic construct
  misc_feature 1..20: note = Description of Artificial Sequence: Synthetic oligonucleotide
  misc_feature 1..20: note = Target: ANGPTL3; (+) strand; PAM type: NRG; PAM sequence: TAG
  source 1..20: mol_type = other DNA
tataccaagagacaatatac

SEQ ID NO: 8755 - DNA, 20 bp, synthetic construct
  misc_feature 1..20: note = Description of Artificial Sequence: Synthetic oligonucleotide
  misc_feature 1..20: note = Target: ANGPTL3; (+) strand; PAM type: NRG; PAM sequence: AAG
  source 1..20: mol_type = other DNA
gagacaatatactagaaacc

SEQ ID NO: 8756 - DNA, 20 bp, synthetic construct
  misc_feature 1..20: note = Description of Artificial Sequence: Synthetic oligonucleotide
  misc_feature 1..20: note = Target: ANGPTL3; (+) strand; PAM type: NRG; PAM sequence: CAG
  source 1..20: mol_type = other DNA
gaccattacctctactctgt

SEQ ID NO: 8757 - DNA, 20 bp, synthetic construct
  misc_feature 1..20: note = Description of Artificial Sequence: Synthetic oligonucleotide
  misc_feature 1..20: note = Target: ANGPTL3; (+) strand; PAM type: NRG; PAM sequence: GAG
  source 1..20: mol_type = other DNA
actctgtcagtgttatttgt

SEQ ID NO: 8758 - DNA, 20 bp, synthetic construct
  misc_feature 1..20: note = Description of Artificial Sequence: Synthetic oligonucleotide
  misc_feature 1..20: note = Target: ANGPTL3; (+) strand; PAM type: NRG; PAM sequence: AAG
  source 1..20: mol_type = other DNA
aattgcacaaattttgcaaa

SEQ ID NO: 8759 - DNA, 20 bp, synthetic construct
  misc_feature 1..20: note = Description of Artificial Sequence: Synthetic oligonucleotide
  misc_feature 1..20: note = Target: ANGPTL3; (+) strand; PAM type: NRG; PAM sequence: TAG
  source 1..20: mol_type = other DNA
acaaattttgcaaaaagtgt

SEQ ID NO: 8760 - DNA, 20 bp, synthetic construct
  misc_feature 1..20: note = Description of Artificial Sequence: Synthetic oligonucleotide
  misc_feature 1..20: note = Target: ANGPTL3; (+) strand; PAM type: NRG; PAM sequence: CAG
  source 1..20: mol_type = other DNA
aaagtgttagtatcctacta

SEQ ID NO: 8761 - DNA, 20 bp, synthetic construct
  misc_feature 1..20: note = Description of Artificial Sequence: Synthetic oligonucleotide
  misc_feature 1..20: note = Target: ANGPTL3; (+) strand; PAM type: NRG; PAM sequence: TAG
  source 1..20: mol_type = other DNA
gtgttagtatcctactacag

SEQ ID NO: 8762 - DNA, 20 bp, synthetic construct
  misc_feature 1..20: note = Description of Artificial Sequence: Synthetic oligonucleotide
  misc_feature 1..20: note = Target: ANGPTL3; (+) strand; PAM type: NRG; PAM sequence: AGG
  source 1..20: mol_type = other DNA
tgttagtatcctactacagt

SEQ ID NO: 8763 - DNA, 20 bp, synthetic construct
  misc_feature 1..20: note = Description of Artificial Sequence: Synthetic oligonucleotide
  misc_feature 1..20: note = Target: ANGPTL3; (+) strand; PAM type: NRG; PAM sequence: TAG
  source 1..20: mol_type = other DNA
tactacagtaggatataata

SEQ ID NO: 8764 - DNA, 20 bp, synthetic construct
  misc_feature 1..20: note = Description of Artificial Sequence: Synthetic oligonucleotide
  misc_feature 1..20: note = Target: ANGPTL3; (+) strand; PAM type: NRG; PAM sequence: AAG
  source 1..20: mol_type = other DNA
tacagtaggatataatatag

SEQ ID NO: 8765 - DNA, 20 bp, synthetic construct
  misc_feature 1..20: note = Description of Artificial Sequence: Synthetic oligonucleotide
  misc_feature 1..20: note = Target: ANGPTL3; (+) strand; PAM type: NRG; PAM sequence: AGG
  source 1..20: mol_type = other DNA
acagtaggatataatataga

SEQ ID NO: 8766 - DNA, 20 bp, synthetic construct
  misc_feature 1..20: note = Description of Artificial Sequence: Synthetic oligonucleotide
  misc_feature 1..20: note = Target: ANGPTL3; (+) strand; PAM type: NRG; PAM sequence: AAG
  source 1..20: mol_type = other DNA
tagaaggaaataatttcata

SEQ ID NO: 8767 - DNA, 20 bp, synthetic construct
  misc_feature 1..20: note = Description of Artificial Sequence: Synthetic oligonucleotide
  misc_feature 1..20: note = Target: ANGPTL3; (+) strand; PAM type: NRG; PAM sequence: TGG
  source 1..20: mol_type = other DNA
aatttcataaagcctgtctt

SEQ ID NO: 8768 - DNA, 20 bp, synthetic construct
  misc_feature 1..20: note = Description of Artificial Sequence: Synthetic oligonucleotide
  misc_feature 1..20: note = Target: ANGPTL3; (+) strand; PAM type: NRG; PAM sequence: TAG
  source 1..20: mol_type = other DNA
ataaagcctgtctttggtac

SEQ ID NO: 8769 - DNA, 20 bp, synthetic construct
  misc_feature 1..20: note = Description of Artificial Sequence: Synthetic oligonucleotide
  misc_feature 1..20: note = Target: ANGPTL3; (+) strand; PAM type: NRG; PAM sequence: CAG
  source 1..20: mol_type = other DNA
ctgtctttggtactagtgct

SEQ ID NO: 8770 - DNA, 20 bp, synthetic construct
  misc_feature 1..20: note = Description of Artificial Sequence: Synthetic oligonucleotide
  misc_feature 1..20: note = Target: ANGPTL3; (+) strand; PAM type: NRG; PAM sequence: AAG
  source 1..20: mol_type = other DNA
gttactttcattaactaaaa

SEQ ID NO: 8771 - DNA, 20 bp, synthetic construct
  misc_feature 1..20: note = Description of Artificial Sequence: Synthetic oligonucleotide
  misc_feature 1..20: note = Target: ANGPTL3; (+) strand; PAM type: NRG; PAM sequence: AGG
  source 1..20: mol_type = other DNA
ttactttcattaactaaaaa

SEQ ID NO: 8772 - DNA, 20 bp, synthetic construct
  misc_feature 1..20: note = Description of Artificial Sequence: Synthetic oligonucleotide
  misc_feature 1..20: note = Target: ANGPTL3; (+) strand; PAM type: NRG; PAM sequence: GGG
  source 1..20: mol_type = other DNA
tactttcattaactaaaaaa

SEQ ID NO: 8773 - DNA, 20 bp, synthetic construct
  misc_feature 1..20: note = Description of Artificial Sequence: Synthetic oligonucleotide
  misc_feature 1..20: note = Target: ANGPTL3; (+) strand; PAM type: NRG; PAM sequence: GGG
  source 1..20: mol_type = other DNA
actttcattaactaaaaaag

SEQ ID NO: 8774 - DNA, 20 bp, synthetic construct
  misc_feature 1..20: note = Description of Artificial Sequence: Synthetic oligonucleotide
  misc_feature 1..20: note = Target: ANGPTL3; (+) strand; PAM type: NRG; PAM sequence: AAG
  source 1..20: mol_type = other DNA
ttcaaattcccttctctaaa

SEQ ID NO: 8775 - DNA, 20 bp, synthetic construct
  misc_feature 1..20: note = Description of Artificial Sequence: Synthetic oligonucleotide
  misc_feature 1..20: note = Target: ANGPTL3; (+) strand; PAM type: NRG; PAM sequence: AAG
  source 1..20: mol_type = other DNA
aaaagaatgtactatatcaa

SEQ ID NO: 8776 - DNA, 20 bp, synthetic construct
  misc_feature 1..20: note = Description of Artificial Sequence: Synthetic oligonucleotide
  misc_feature 1..20: note = Target: ANGPTL3; (+) strand; PAM type: NRG; PAM sequence: AGG
  source 1..20: mol_type = other DNA
aaagaatgtactatatcaaa

SEQ ID NO: 8777 - DNA, 20 bp, synthetic construct
  misc_feature 1..20: note = Description of Artificial Sequence: Synthetic oligonucleotide
  misc_feature 1..20: note = Target: ANGPTL3; (+) strand; PAM type: NRG; PAM sequence: GGG
  source 1..20: mol_type = other DNA
aagaatgtactatatcaaaa

SEQ ID NO: 8778 - DNA, 20 bp, synthetic construct
  misc_feature 1..20: note = Description of Artificial Sequence: Synthetic oligonucleotide
  misc_feature 1..20: note = Target: ANGPTL3; (+) strand; PAM type: NRG; PAM sequence: GGG
  source 1..20: mol_type = other DNA
agaatgtactatatcaaaag

SEQ ID NO: 8779 - DNA, 20 bp, synthetic construct
  misc_feature 1..20: note = Description of Artificial Sequence: Synthetic oligonucleotide
  misc_feature 1..20: note = Target: ANGPTL3; (+) strand; PAM type: NRG; PAM sequence: GGG
  source 1..20: mol_type = other DNA
gaatgtactatatcaaaagg

SEQ ID NO: 8780 - DNA, 20 bp, synthetic construct
  misc_feature 1..20: note = Description of Artificial Sequence: Synthetic oligonucleotide
  misc_feature 1..20: note = Target: ANGPTL3; (+) strand; PAM type: NRG; PAM sequence: TAG
  source 1..20: mol_type = other DNA
ctacgtatacattctgcact

SEQ ID NO: 8781 - DNA, 20 bp, synthetic construct
  misc_feature 1..20: note = Description of Artificial Sequence: Synthetic oligonucleotide
  misc_feature 1..20: note = Target: ANGPTL3; (+) strand; PAM type: NRG; PAM sequence: AAG
  source 1..20: mol_type = other DNA
atattgtttctacaatgtgt

SEQ ID NO: 8782 - DNA, 20 bp, synthetic construct
  misc_feature 1..20: note = Description of Artificial Sequence: Synthetic oligonucleotide
  misc_feature 1..20: note = Target: ANGPTL3; (+) strand; PAM type: NRG; PAM sequence: AGG
  source 1..20: mol_type = other DNA
tattgtttctacaatgtgta

SEQ ID NO: 8783 - DNA, 20 bp, synthetic construct
  misc_feature 1..20: note = Description of Artificial Sequence: Synthetic oligonucleotide
  misc_feature 1..20: note = Target: ANGPTL3; (+) strand; PAM type: NRG; PAM sequence: AAG
  source 1..20: mol_type = other DNA
tgtaaggcattactgtacta

SEQ ID NO: 8784 - DNA, 20 bp, synthetic construct
  misc_feature 1..20: note = Description of Artificial Sequence: Synthetic oligonucleotide
  misc_feature 1..20: note = Target: ANGPTL3; (+) strand; PAM type: NRG; PAM sequence: AAG
  source 1..20: mol_type = other DNA
ttactgtactaaagcattat

SEQ ID NO: 8785 - DNA, 20 bp, synthetic construct
  misc_feature 1..20: note = Description of Artificial Sequence: Synthetic oligonucleotide
  misc_feature 1..20: note = Target: ANGPTL3; (+) strand; PAM type: NRG; PAM sequence: AGG
  source 1..20: mol_type = other DNA
tactgtactaaagcattata

SEQ ID NO: 8786 - DNA, 20 bp, synthetic construct
  misc_feature 1..20: note = Description of Artificial Sequence: Synthetic oligonucleotide
  misc_feature 1..20: note = Target: ANGPTL3; (+) strand; PAM type: NRG; PAM sequence: AAG
  source 1..20: mol_type = other DNA
taaagcattataaggaatat

SEQ ID NO: 8787 - DNA, 20 bp, synthetic construct
  misc_feature 1..20: note = Description of Artificial Sequence: Synthetic oligonucleotide
  misc_feature 1..20: note = Target: ANGPTL3; (+) strand; PAM type: NRG; PAM sequence: CAG
  source 1..20: mol_type = other DNA
atacaaatcttgccaatcaa

SEQ ID NO: 8788 - DNA, 20 bp, synthetic construct
  misc_feature 1..20: note = Description of Artificial Sequence: Synthetic oligonucleotide
  misc_feature 1..20: note = Target: ANGPTL3; (+) strand; PAM type: NRG; PAM sequence: TAG
  source 1..20: mol_type = other DNA
tcttgccaatcaacagctta

SEQ ID NO: 8789 - DNA, 20 bp, synthetic construct
  misc_feature 1..20: note = Description of Artificial Sequence: Synthetic oligonucleotide
  misc_feature 1..20: note = Target: ANGPTL3; (+) strand; PAM type: NRG; PAM sequence: TAG
  source 1..20: mol_type = other DNA
atcaacagcttatagtgtaa

SEQ ID NO: 8790 - DNA, 20 bp, synthetic construct
  misc_feature 1..20: note = Description of Artificial Sequence: Synthetic oligonucleotide
  misc_feature 1..20: note = Target: ANGPTL3; (+) strand; PAM type: NRG; PAM sequence: AGG
  source 1..20: mol_type = other DNA
tcaacagcttatagtgtaat

SEQ ID NO: 8791 - DNA, 20 bp, synthetic construct
  misc_feature 1..20: note = Description of Artificial Sequence: Synthetic oligonucleotide
  misc_feature 1..20: note = Target: ANGPTL3; (+) strand; PAM type: NRG; PAM sequence: GGG
  source 1..20: mol_type = other DNA
caacagcttatagtgtaata

SEQ ID NO: 8792 - DNA, 20 bp, synthetic construct
  misc_feature 1..20: note = Description of Artificial Sequence: Synthetic oligonucleotide
  misc_feature 1..20: note = Target: ANGPTL3; (+) strand; PAM type: NRG; PAM sequence: GGG
  source 1..20: mol_type = other DNA
aacagcttatagtgtaatag

SEQ ID NO: 8793 - DNA, 20 bp, synthetic construct
  misc_feature 1..20: note = Description of Artificial Sequence: Synthetic oligonucleotide
  misc_feature 1..20: note = Target: ANGPTL3; (+) strand; PAM type: NRG; PAM sequence: GAG
  source 1..20: mol_type = other DNA
cagcttatagtgtaataggg

SEQ ID NO: 8794 - DNA, 20 bp, synthetic construct
  misc_feature 1..20: note = Description of Artificial Sequence: Synthetic oligonucleotide
  misc_feature 1..20: note = Target: ANGPTL3; (+) strand; PAM type: NRG; PAM sequence: GAG
  source 1..20: mol_type = other DNA
gcttatagtgtaatagggga

SEQ ID NO: 8795 - DNA, 20 bp, synthetic construct
  misc_feature 1..20: note = Description of Artificial Sequence: Synthetic oligonucleotide
  misc_feature 1..20: note = Target: ANGPTL3; (+) strand; PAM type: NRG; PAM sequence: AAG
  source 1..20: mol_type = other DNA
tatagtgtaataggggagag

SEQ ID NO: 8796 - DNA, 20 bp, synthetic construct
  misc_feature 1..20: note = Description of Artificial Sequence: Synthetic oligonucleotide
  misc_feature 1..20: note = Target: ANGPTL3; (+) strand; PAM type: NRG; PAM sequence: TGG
  source 1..20: mol_type = other DNA
gtgtaataggggagagaagc

SEQ ID NO: 8797 - DNA, 20 bp, synthetic construct
  misc_feature 1..20: note = Description of Artificial Sequence: Synthetic oligonucleotide
  misc_feature 1..20: note = Target: ANGPTL3; (+) strand; PAM type: NRG; PAM sequence: TAG
  source 1..20: mol_type = other DNA
catctatattctccctcaac

SEQ ID NO: 8798 - DNA, 20 bp, synthetic construct
  misc_feature 1..20: note = Description of Artificial Sequence: Synthetic oligonucleotide
  misc_feature 1..20: note = Target: ANGPTL3; (+) strand; PAM type: NRG; PAM sequence: AAG
  source 1..20: mol_type = other DNA
tatattctccctcaactagc

SEQ ID NO: 8799 - DNA, 20 bp, synthetic construct
  misc_feature 1..20: note = Description of Artificial Sequence: Synthetic oligonucleotide
  misc_feature 1..20: note = Target: ANGPTL3; (+) strand; PAM type: NRG; PAM sequence: TGG
  source 1..20: mol_type = other DNA
attctccctcaactagcaag

SEQ ID NO: 8800 - DNA, 20 bp, synthetic construct
  misc_feature 1..20: note = Description of Artificial Sequence: Synthetic oligonucleotide
  misc_feature 1..20: note = Target: ANGPTL3; (+) strand; PAM type: NRG; PAM sequence: CAG
  source 1..20: mol_type = other DNA
ctagcaagtggatgaaatat

SEQ ID NO: 8801 - DNA, 20 bp, synthetic construct
  misc_feature 1..20: note = Description of Artificial Sequence: Synthetic oligonucleotide
  misc_feature 1..20: note = Target: ANGPTL3; (+) strand; PAM type: NRG; PAM sequence: AGG
  source 1..20: mol_type = other DNA
tagcaagtggatgaaatatc

SEQ ID NO: 8802 - DNA, 20 bp, synthetic construct
  misc_feature 1..20: note = Description of Artificial Sequence: Synthetic oligonucleotide
  misc_feature 1..20: note = Target: ANGPTL3; (+) strand; PAM type: NRG; PAM sequence: GGG
  source 1..20: mol_type = other DNA
agcaagtggatgaaatatca

SEQ ID NO: 8803 - DNA, 20 bp, synthetic construct
  misc_feature 1..20: note = Description of Artificial Sequence: Synthetic oligonucleotide
  misc_feature 1..20: note = Target: ANGPTL3; (+) strand; PAM type: NRG; PAM sequence: TAG
  source 1..20: mol_type = other DNA
ggatgaaatatcagggtcaa

SEQ ID NO: 8804 - DNA, 20 bp, synthetic construct
  misc_feature 1..20: note = Description of Artificial Sequence: Synthetic oligonucleotide
  misc_feature 1..20: note = Target: ANGPTL3; (+) strand; PAM type: NRG; PAM sequence: AAG
  source 1..20: mol_type = other DNA
atatcagggtcaatagttat

SEQ ID NO: 8805 - DNA, 20 bp, synthetic construct
  misc_feature 1..20: note = Description of Artificial Sequence: Synthetic oligonucleotide
  misc_feature 1..20: note = Target: ANGPTL3; (+) strand; PAM type: NRG; PAM sequence: AAG
  source 1..20: mol_type = other DNA
tcaatagttataagccacaa

SEQ ID NO: 8806 - DNA, 20 bp, synthetic construct
  misc_feature 1..20: note = Description of Artificial Sequence: Synthetic oligonucleotide
  misc_feature 1..20: note = Target: ANGPTL3; (+) strand; PAM type: NRG; PAM sequence: CAG
  source 1..20: mol_type = other DNA
ttataagccacaaaagctga

SEQ ID NO: 8807 - DNA, 20 bp, synthetic construct
  misc_feature 1..20: note = Description of Artificial Sequence: Synthetic oligonucleotide
  misc_feature 1..20: note = Target: ANGPTL3; (+) strand; PAM type: NRG; PAM sequence: AAG
  source 1..20: mol_type = other DNA
caaaagctgacagcttaatt

SEQ ID NO: 8808 - DNA, 20 bp, synthetic construct
  misc_feature 1..20: note = Description of Artificial Sequence: Synthetic oligonucleotide
  misc_feature 1..20: note = Target: ANGPTL3; (+) strand; PAM type: NRG; PAM sequence: GAG
  source 1..20: mol_type = other DNA
aaagctgacagcttaattaa

SEQ ID NO: 8809 - DNA, 20 bp, synthetic construct
  misc_feature 1..20: note = Description of Artificial Sequence: Synthetic oligonucleotide
  misc_feature 1..20: note = Target: ANGPTL3; (+) strand; PAM type: NRG; PAM sequence: AAG
  source 1..20: mol_type = other DNA
gctgacagcttaattaagag

SEQ ID NO: 8810 - DNA, 20 bp, synthetic construct
  misc_feature 1..20: note = Description of Artificial Sequence: Synthetic oligonucleotide
  misc_feature 1..20: note = Target: ANGPTL3; (+) strand; PAM type: NRG; PAM sequence: AAG
  source 1..20: mol_type = other DNA
aactgtaacttttctattta

SEQ ID NO: 8811 - DNA, 20 bp, synthetic construct
  misc_feature 1..20: note = Description of Artificial Sequence: Synthetic oligonucleotide
  misc_feature 1..20: note = Target: ANGPTL3; (+) strand; PAM type: NRG; PAM sequence: AAG
  source 1..20: mol_type = other DNA
tgtaacttttctatttaaag

SEQ ID NO: 8812 - DNA, 20 bp, synthetic construct
  misc_feature 1..20: note = Description of Artificial Sequence: Synthetic oligonucleotide
  misc_feature 1..20: note = Target: ANGPTL3; (+) strand; PAM type: NRG; PAM sequence: AGG
  source 1..20: mol_type = other DNA
gtaacttttctatttaaaga

SEQ ID NO: 8813 - DNA, 20 bp, synthetic construct
  misc_feature 1..20: note = Description of Artificial Sequence: Synthetic oligonucleotide
  misc_feature 1..20: note = Target: ANGPTL3; (+) strand; PAM type: NRG; PAM sequence: GAG
  source 1..20: mol_type = other DNA
aacttttctatttaaagaag

SEQ ID NO: 8814 - DNA, 20 bp, synthetic construct
  misc_feature 1..20: note = Description of Artificial Sequence: Synthetic oligonucleotide
  misc_feature 1..20: note = Target: ANGPTL3; (+) strand; PAM type: NRG; PAM sequence: TAG
  source 1..20: mol_type = other DNA
gaaaatttgaatttcttctc

SEQ ID NO: 8815 - DNA, 20 bp, synthetic construct
  misc_feature 1..20: note = Description of Artificial Sequence: Synthetic oligonucleotide
  misc_feature 1..20: note = Target: ANGPTL3; (+) strand; PAM type: NRG; PAM sequence: CAG
  source 1..20: mol_type = other DNA
tataattccattacatgaac

SEQ ID NO: 8816 - DNA, 20 bp, synthetic construct
  misc_feature 1..20: note = Description of Artificial Sequence: Synthetic oligonucleotide
  misc_feature 1..20: note = Target: ANGPTL3; (+) strand; PAM type: NRG; PAM sequence: GAG
  source 1..20: mol_type = other DNA
taattccattacatgaacca

SEQ ID NO: 8817 - DNA, 20 bp, synthetic construct
  misc_feature 1..20: note = Description of Artificial Sequence: Synthetic oligonucleotide
  misc_feature 1..20: note = Target: ANGPTL3; (+) strand; PAM type: NRG; PAM sequence: AAG
  source 1..20: mol_type = other DNA
ccattacatgaaccagagta

SEQ ID NO: 8818 - DNA, 20 bp, synthetic construct
  misc_feature 1..20: note = Description of Artificial Sequence: Synthetic oligonucleotide
  misc_feature 1..20: note = Target: ANGPTL3; (+) strand; PAM type: NRG; PAM sequence: AGG
  source 1..20: mol_type = other DNA
cattacatgaaccagagtaa

SEQ ID NO: 8819 - DNA, 20 bp, synthetic construct
  misc_feature 1..20: note = Description of Artificial Sequence: Synthetic oligonucleotide
  misc_feature 1..20: note = Target: ANGPTL3; (+) strand; PAM type: NRG; PAM sequence: GGG
  source 1..20: mol_type = other DNA
attacatgaaccagagtaaa

SEQ ID NO: 8820 - DNA, 20 bp, synthetic construct
  misc_feature 1..20: note = Description of Artificial Sequence: Synthetic oligonucleotide
  misc_feature 1..20: note = Target: ANGPTL3; (+) strand; PAM type: NRG; PAM sequence: AAG
  source 1..20: mol_type = other DNA
catgaaccagagtaaagggt

SEQ ID NO: 8821 - DNA, 20 bp, synthetic construct
  misc_feature 1..20: note = Description of Artificial Sequence: Synthetic oligonucleotide
  misc_feature 1..20: note = Target: ANGPTL3; (+) strand; PAM type: NRG; PAM sequence: TGG
  source 1..20: mol_type = other DNA
aaccagagtaaagggtaaga

SEQ ID NO: 8822 - DNA, 20 bp, synthetic construct
  misc_feature 1..20: note = Description of Artificial Sequence: Synthetic oligonucleotide
  misc_feature 1..20: note = Target: ANGPTL3; (+) strand; PAM type: NRG; PAM sequence: AAG
  source 1..20: mol_type = other DNA
taaagggtaagatggaaatg

SEQ ID NO: 8823 - DNA, 20 bp, synthetic construct
  misc_feature 1..20: note = Description of Artificial Sequence: Synthetic oligonucleotide
  misc_feature 1..20: note = Target: ANGPTL3; (+) strand; PAM type: NRG; PAM sequence: TGG
  source 1..20: mol_type = other DNA
aatattttcttacccttttg

SEQ ID NO: 8824 - DNA, 20 bp, synthetic construct
  misc_feature 1..20: note = Description of Artificial Sequence: Synthetic oligonucleotide
  misc_feature 1..20: note = Target: ANGPTL3; (+) strand; PAM type: NRG; PAM sequence: TGG
  source 1..20: mol_type = other DNA
acccttttgtggttctatat

SEQ ID NO: 8825 - DNA, 20 bp, synthetic construct
  misc_feature 1..20: note = Description of Artificial Sequence: Synthetic oligonucleotide
  misc_feature 1..20: note = Target: ANGPTL3; (+) strand; PAM type: NRG; PAM sequence: AAG
  source 1..20: mol_type = other DNA
atcatacacaacctaatcaa

SEQ ID NO: 8826 - DNA, 20 bp, synthetic construct
  misc_feature 1..20: note = Description of Artificial Sequence: Synthetic oligonucleotide
  misc_feature 1..20: note = Target: ANGPTL3; (+) strand; PAM type: NRG; PAM sequence: AAG
  source 1..20: mol_type = other DNA
aaaagatgtaattctttaaa

SEQ ID NO: 8827 - DNA, 20 bp, synthetic construct
  misc_feature 1..20: note = Description of Artificial Sequence: Synthetic oligonucleotide
  misc_feature 1..20: note = Target: ANGPTL3; (+) strand; PAM type: NRG; PAM sequence: AGG
  source 1..20: mol_type = other DNA
aaagatgtaattctttaaaa

SEQ ID NO: 8828 - DNA, 20 bp, synthetic construct
  misc_feature 1..20: note = Description of Artificial Sequence: Synthetic oligonucleotide
  misc_feature 1..20: note = Target: ANGPTL3; (+) strand; PAM type: NRG; PAM sequence: GAG
  source 1..20: mol_type = other DNA
gtaattctttaaaaaggtac

SEQ ID NO: 8829 - DNA, 20 bp, synthetic construct
  misc_feature 1..20: note = Description of Artificial Sequence: Synthetic oligonucleotide
  misc_feature 1..20: note = Target: ANGPTL3; (+) strand; PAM type: NRG; PAM sequence: CAG
  source 1..20: mol_type = other DNA
aaaggtacgagaccaaaatt

SEQ ID NO: 8830 - DNA, 20 bp, synthetic construct
  misc_feature 1..20: note = Description of Artificial Sequence: Synthetic oligonucleotide
  misc_feature 1..20: note = Target: ANGPTL3; (+) strand; PAM type: NRG; PAM sequence: TAG
  source 1..20: mol_type = other DNA
agaccaaaattcagaaaatc

SEQ ID NO: 8831 - DNA, 20 bp, synthetic construct
  misc_feature 1..20: note = Description of Artificial Sequence: Synthetic oligonucleotide
  misc_feature 1..20: note = Target: ANGPTL3; (+) strand; PAM type: NRG; PAM sequence: CAG
  source 1..20: mol_type = other DNA
aatatgcaattaattttcac

SEQ ID NO: 8832 - DNA, 20 bp, synthetic construct
  misc_feature 1..20: note = Description of Artificial Sequence: Synthetic oligonucleotide
  misc_feature 1..20: note = Target: ANGPTL3; (+) strand; PAM type: NRG; PAM sequence: TAG
  source 1..20: mol_type = other DNA
ttttcaccagtaaaatacta

SEQ ID NO: 8833 - DNA, 20 bp, synthetic construct
  misc_feature 1..20: note = Description of Artificial Sequence: Synthetic oligonucleotide
  misc_feature 1..20: note = Target: ANGPTL3; (+) strand; PAM type: NRG; PAM sequence: TGG
  source 1..20: mol_type = other DNA
accagtaaaatactatagta

SEQ ID NO: 8834 - DNA, 20 bp, synthetic construct
  misc_feature 1..20: note = Description of Artificial Sequence: Synthetic oligonucleotide
  misc_feature 1..20: note = Target: ANGPTL3; (+) strand; PAM type: NRG; PAM sequence: GGG
  source 1..20: mol_type = other DNA
ccagtaaaatactatagtat

SEQ ID NO: 8835 - DNA, 20 bp, synthetic construct
  misc_feature 1..20: note = Description of Artificial Sequence: Synthetic oligonucleotide
  misc_feature 1..20: note = Target: ANGPTL3; (+) strand; PAM type: NRG; PAM sequence: TAG
  source 1..20: mol_type = other DNA
atgggtacaaatgcattgat

SEQ ID NO: 8836 - DNA, 20 bp, synthetic construct
  misc_feature 1..20: note = Description of Artificial Sequence: Synthetic oligonucleotide
  misc_feature 1..20: note = Target: ANGPTL3; (+) strand; PAM type: NRG; PAM sequence: TGG
  source 1..20: mol_type = other DNA
attagttctaattacaaaaa

SEQ ID NO: 8837 - DNA, 20 bp, synthetic construct
  misc_feature 1..20: note = Description of Artificial Sequence: Synthetic oligonucleotide
  misc_feature 1..20: note = Target: ANGPTL3; (+) strand; PAM type: NRG; PAM sequence: TAG
  source 1..20: mol_type = other DNA
ggctaatatataatactgtg

SEQ ID NO: 8838 - DNA, 20 bp, synthetic construct
  misc_feature 1..20: note = Description of Artificial Sequence: Synthetic oligonucleotide
  misc_feature 1..20: note = Target: ANGPTL3; (+) strand; PAM type: NRG; PAM sequence: CAG
  source 1..20: mol_type = other DNA
gtgtagtgtttatgatacat

SEQ ID NO: 8839 - DNA, 20 bp, synthetic construct
  misc_feature 1..20: note = Description of Artificial Sequence: Synthetic oligonucleotide
  misc_feature 1..20: note = Target: ANGPTL3; (+) strand; PAM type: NRG; PAM sequence: AAG
  source 1..20: mol_type = other DNA
gatacatcagataatgttct

SEQ ID NO: 8840 - DNA, 20 bp, synthetic construct
  misc_feature 1..20: note = Description of Artificial Sequence: Synthetic oligonucleotide
  misc_feature 1..20: note = Target: ANGPTL3; (+) strand; PAM type: NRG; PAM sequence: TAG
  source 1..20: mol_type = other DNA
ttttatacgaccctataaaa

SEQ ID NO: 8841 - DNA, 20 bp, synthetic construct
  misc_feature 1..20: note = Description of Artificial Sequence: Synthetic oligonucleotide
  misc_feature 1..20: note = Target: ANGPTL3; (+) strand; PAM type: NRG; PAM sequence: AGG
  source 1..20: mol_type = other DNA
tttatacgaccctataaaat

SEQ ID NO: 8842 - DNA, 20 bp, synthetic construct
  misc_feature 1..20: note = Description of Artificial Sequence: Synthetic oligonucleotide
  misc_feature 1..20: note = Target: ANGPTL3; (+) strand; PAM type: NRG; PAM sequence: TGG
  source 1..20: mol_type = other DNA
aaaataggtgttattctcac

SEQ ID NO: 8843 - DNA, 20 bp, synthetic construct
  misc_feature 1..20: note = Description of Artificial Sequence: Synthetic oligonucleotide
  misc_feature 1..20: note = Target: ANGPTL3; (+) strand; PAM type: NRG; PAM sequence: GAG
  source 1..20: mol_type = other DNA
aataggtgttattctcactg

SEQ ID NO: 8844 - DNA, 20 bp, synthetic construct
  misc_feature 1..20: note = Description of Artificial Sequence: Synthetic oligonucleotide
  misc_feature 1..20: note = Target: ANGPTL3; (+) strand; PAM type: NRG; PAM sequence: GAG
  source 1..20: mol_type = other DNA
taggtgttattctcactgga

SEQ ID NO: 8845 - DNA, 20 bp, synthetic construct
  misc_feature 1..20: note = Description of Artificial Sequence: Synthetic oligonucleotide
  misc_feature 1..20: note = Target: ANGPTL3; (+) strand; PAM type: NRG; PAM sequence: GAG
  source 1..20: mol_type = other DNA
gttattctcactggagagat

SEQ ID NO: 8846 - DNA, 20 bp, synthetic construct
  misc_feature 1..20: note = Description of Artificial Sequence: Synthetic oligonucleotide
  misc_feature 1..20: note = Target: ANGPTL3; (+) strand; PAM type: NRG; PAM sequence: CAG
  source 1..20: mol_type = other DNA
tcactggagagatgagaaaa

SEQ ID NO: 8847 - DNA, 20 bp, synthetic construct
  misc_feature 1..20: note = Description of Artificial Sequence: Synthetic oligonucleotide
  misc_feature 1..20: note = Target: ANGPTL3; (+) strand; PAM type: NRG; PAM sequence: AGG
  source 1..20: mol_type = other DNA
cactggagagatgagaaaac

SEQ ID NO: 8848 - DNA, 20 bp, synthetic construct
  misc_feature 1..20: note = Description of Artificial Sequence: Synthetic oligonucleotide
  misc_feature 1..20: note = Target: ANGPTL3; (+) strand; PAM type: NRG; PAM sequence: GGG
  source 1..20: mol_type = other DNA
actggagagatgagaaaaca

SEQ ID NO: 8849 - DNA, 20 bp, synthetic construct
  misc_feature 1..20: note = Description of Artificial Sequence: Synthetic oligonucleotide
  misc_feature 1..20: note = Target: ANGPTL3; (+) strand; PAM type: NRG; PAM sequence: GGG
  source 1..20: mol_type = other DNA
ctggagagatgagaaaacag

SEQ ID NO: 8850 - DNA, 20 bp, synthetic construct
  misc_feature 1..20: note = Description of Artificial Sequence: Synthetic oligonucleotide
  misc_feature 1..20: note = Target: ANGPTL3; (+) strand; PAM type: NRG; PAM sequence: CAG
  source 1..20: mol_type = other DNA
gagatgagaaaacaggggtt

SEQ ID NO: 8851 - DNA, 20 bp, synthetic construct
  misc_feature 1..20: note = Description of Artificial Sequence: Synthetic oligonucleotide
  misc_feature 1..20: note = Target: ANGPTL3; (+) strand; PAM type: NRG; PAM sequence: GAG
  source 1..20: mol_type = other DNA
gatgagaaaacaggggttca

SEQ ID NO: 8852 - DNA, 20 bp, synthetic construct
  misc_feature 1..20: note = Description of Artificial Sequence: Synthetic oligonucleotide
  misc_feature 1..20: note = Target: ANGPTL3; (+) strand; PAM type: NRG; PAM sequence: AAG
  source 1..20: mol_type = other DNA
aacaggggttcagagatgtg

SEQ ID NO: 8853 - DNA, 20 bp, synthetic construct
  misc_feature 1..20: note = Description of Artificial Sequence: Synthetic oligonucleotide
  misc_feature 1..20: note = Target: ANGPTL3; (+) strand; PAM type: NRG; PAM sequence: AAG
  source 1..20: mol_type = other DNA
gatgtgaagtaatttgacca

SEQ ID NO: 8854 - DNA, 20 bp, synthetic construct
  misc_feature 1..20: note = Description of Artificial Sequence: Synthetic oligonucleotide
  misc_feature 1..20: note = Target: ANGPTL3; (+) strand; PAM type: NRG; PAM sequence: AGG
  source 1..20: mol_type = other DNA
atgtgaagtaatttgaccaa

SEQ ID NO: 8855 - DNA, 20 bp, synthetic construct
  misc_feature 1..20: note = Description of Artificial Sequence: Synthetic oligonucleotide
  misc_feature 1..20: note = Target: ANGPTL3; (+) strand; PAM type: NRG; PAM sequence: AAG
  source 1..20: mol_type = other DNA
taatttgaccaaaggtcaca

SEQ ID NO: 8856 - DNA, 20 bp, synthetic construct
  misc_feature 1..20: note = Description of Artificial Sequence: Synthetic oligonucleotide
  misc_feature 1..20: note = Target: ANGPTL3; (+) strand; PAM type: NRG; PAM sequence: AAG
  source 1..20: mol_type = other DNA
gaccaaaggtcacaaagctg

SEQ ID NO: 8857 - DNA, 20 bp, synthetic construct
  misc_feature 1..20: note = Description of Artificial Sequence: Synthetic oligonucleotide
  misc_feature 1..20: note = Target: ANGPTL3; (+) strand; PAM type: NRG; PAM sequence: CGG
  source 1..20: mol_type = other DNA
aagctgaagaatatgaaatc

SEQ ID NO: 8858 - DNA, 20 bp, synthetic construct
  misc_feature 1..20: note = Description of Artificial Sequence: Synthetic oligonucleotide
  misc_feature 1..20: note = Target: ANGPTL3; (+) strand; PAM type: NRG; PAM sequence: GGG
  source 1..20: mol_type = other DNA
agctgaagaatatgaaatcc

SEQ ID NO: 8859 - DNA, 20 bp, synthetic construct
  misc_feature 1..20: note = Description of Artificial Sequence: Synthetic oligonucleotide
  misc_feature 1..20: note = Target: ANGPTL3; (+) strand; PAM type: NRG; PAM sequence: CAG
  source 1..20: mol_type = other DNA
tgaaatccgggattctgatt

SEQ ID NO: 8860 - DNA, 20 bp, synthetic construct
  misc_feature 1..20: note = Description of Artificial Sequence: Synthetic oligonucleotide
  misc_feature 1..20: note = Target: ANGPTL3; (+) strand; PAM type: NRG; PAM sequence: AGG
  source 1..20: mol_type = other DNA
gaaatccgggattctgattc

SEQ ID NO: 8861 - DNA, 20 bp, synthetic construct
  misc_feature 1..20: note = Description of Artificial Sequence: Synthetic oligonucleotide
  misc_feature 1..20: note = Target: ANGPTL3; (+) strand; PAM type: NRG; PAM sequence: CAG
  source 1..20: mol_type = other DNA
atccgggattctgattcagg

SEQ ID NO: 8862 - DNA, 20 bp, synthetic construct
  misc_feature 1..20: note = Description of Artificial Sequence: Synthetic oligonucleotide
  misc_feature 1..20: note = Target: ANGPTL3; (+) strand; PAM type: NRG; PAM sequence: CAG
  source 1..20: mol_type = other DNA
tgattcaggcagtcttattc

SEQ ID NO: 8863 - DNA, 20 bp, synthetic construct
  misc_feature 1..20: note = Description of Artificial Sequence: Synthetic oligonucleotide
  misc_feature 1..20: note = Target: ANGPTL3; (+) strand; PAM type: NRG; PAM sequence: TGG
  source 1..20: mol_type = other DNA
aatcatgctcttaaccacta

SEQ ID NO: 8864 - DNA, 20 bp, synthetic construct
  misc_feature 1..20: note = Description of Artificial Sequence: Synthetic oligonucleotide
  misc_feature 1..20: note = Target: ANGPTL3; (+) strand; PAM type: NRG; PAM sequence: AAG
  source 1..20: mol_type = other DNA
tacccaaaacccttaatcct

SEQ ID NO: 8865 - DNA, 20 bp, synthetic construct
  misc_feature 1..20: note = Description of Artificial Sequence: Synthetic oligonucleotide
  misc_feature 1..20: note = Target: ANGPTL3; (+) strand; PAM type: NRG; PAM sequence: AAG
  source 1..20: mol_type = other DNA
ccttaatcctaagtcatcaa

SEQ ID NO: 8866 - DNA, 20 bp, synthetic construct
  misc_feature 1..20: note = Description of Artificial Sequence: Synthetic oligonucleotide
  misc_feature 1..20: note = Target: ANGPTL3; (+) strand; PAM type: NRG; PAM sequence: AGG
  source 1..20: mol_type = other DNA
cttaatcctaagtcatcaaa

SEQ ID NO: 8867 - DNA, 20 bp, synthetic construct
  misc_feature 1..20: note = Description of Artificial Sequence: Synthetic oligonucleotide
  misc_feature 1..20: note = Target: ANGPTL3; (+) strand; PAM type: NRG; PAM sequence: AAG
  source 1..20: mol_type = other DNA
aatcctaagtcatcaaaagg

SEQ ID NO: 8868 - DNA, 20 bp, synthetic construct
  misc_feature 1..20: note = Description of Artificial Sequence: Synthetic oligonucleotide
  misc_feature 1..20: note = Target: ANGPTL3; (+) strand; PAM type: NRG; PAM sequence: GAG
  source 1..20: mol_type = other DNA
tcctaagtcatcaaaaggaa

SEQ ID NO: 8869 - DNA, 20 bp, synthetic construct
  misc_feature 1..20: note = Description of Artificial Sequence: Synthetic oligonucleotide
  misc_feature 1..20: note = Target: ANGPTL3; (+) strand; PAM type: NRG; PAM sequence: AAG
  source 1..20: mol_type = other DNA
agcctctattttacacaatg

SEQ ID NO: 8870 - DNA, 20 bp, synthetic construct
  misc_feature 1..20: note = Description of Artificial Sequence: Synthetic oligonucleotide
  misc_feature 1..20: note = Target: ANGPTL3; (+) strand; PAM type: NRG; PAM sequence: GAG
  source 1..20: mol_type = other DNA
cctctattttacacaatgaa

SEQ ID NO: 8871 - DNA, 20 bp, synthetic construct
  misc_feature 1..20: note = Description of Artificial Sequence: Synthetic oligonucleotide
  misc_feature 1..20: note = Target: ANGPTL3; (+) strand; PAM type: NRG; PAM sequence: AGG
  source 1..20: mol_type = other DNA
ctctattttacacaatgaag

SEQ ID NO: 8872 - DNA, 20 bp, synthetic construct
  misc_feature 1..20: note = Description of Artificial Sequence: Synthetic oligonucleotide
  misc_feature 1..20: note = Target: ANGPTL3; (+) strand; PAM type: NRG; PAM sequence: AAG
  source 1..20: mol_type = other DNA
cacaatgaagaggcatttct

SEQ ID NO: 8873 - DNA, 20 bp, synthetic construct
  misc_feature 1..20: note = Description of Artificial Sequence: Synthetic oligonucleotide
  misc_feature 1..20: note = Target: ANGPTL3; (+) strand; PAM type: NRG; PAM sequence: TAG
  source 1..20: mol_type = other DNA
tgaagaggcatttctaagaa

SEQ ID NO: 8874 - DNA, 20 bp, synthetic construct
  misc_feature 1..20: note = Description of Artificial Sequence: Synthetic oligonucleotide
  misc_feature 1..20: note = Target: ANGPTL3; (+) strand; PAM type: NRG; PAM sequence: TAG
  source 1..20: mol_type = other DNA
catttctaagaatagaaatt

SEQ ID NO: 8875 - DNA, 20 bp, synthetic construct
  misc_feature 1..20: note = Description of Artificial Sequence: Synthetic oligonucleotide
  misc_feature 1..20: note = Target: ANGPTL3; (+) strand; PAM type: NRG; PAM sequence: AGG
  source 1..20: mol_type = other DNA
atttctaagaatagaaattt

SEQ ID NO: 8876 - DNA, 20 bp, synthetic construct
  misc_feature 1..20: note = Description of Artificial Sequence: Synthetic oligonucleotide
  misc_feature 1..20: note = Target: ANGPTL3; (+) strand; PAM type: NRG; PAM sequence: GGG
  source 1..20: mol_type = other DNA
tttctaagaatagaaattta

SEQ ID NO: 8877 - DNA, 20 bp, synthetic construct
  misc_feature 1..20: note = Description of Artificial Sequence: Synthetic oligonucleotide
  misc_feature 1..20: note = Target: ANGPTL3; (+) strand; PAM type: NRG; PAM sequence: GAG
  source 1..20: mol_type = other DNA
aagaatagaaatttagggac

SEQ ID NO: 8878 - DNA, 20 bp, synthetic construct
  misc_feature 1..20: note = Description of Artificial Sequence: Synthetic oligonucleotide
  misc_feature 1..20: note = Target: ANGPTL3; (+) strand; PAM type: NRG; PAM sequence: CAG
  source 1..20: mol_type = other DNA
tagaaatttagggacgagca

SEQ ID NO: 8879 - DNA, 20 bp, synthetic construct
  misc_feature 1..20: note = Description of Artificial Sequence: Synthetic oligonucleotide
  misc_feature 1..20: note = Target: ANGPTL3; (+) strand; PAM type: NRG; PAM sequence: TGG
  source 1..20: mol_type = other DNA
aaatttagggacgagcacag

SEQ ID NO: 8880 - DNA, 20 bp, synthetic construct
  misc_feature 1..20: note = Description of Artificial Sequence: Synthetic oligonucleotide
  misc_feature 1..20: note = Target: ANGPTL3; (+) strand; PAM type: NRG; PAM sequence: CAG
  source 1..20: mol_type = other DNA
gtggcttactcctttaatat

SEQ ID NO: 8881 - DNA, 20 bp, synthetic construct
  misc_feature 1..20: note = Description of Artificial Sequence: Synthetic oligonucleotide
  misc_feature 1..20: note = Target: ANGPTL3; (+) strand; PAM type: NRG; PAM sequence: GAG
  source 1..20: mol_type = other DNA
tcctttaatatcagcacttt

SEQ ID NO: 8882 - DNA, 20 bp, synthetic construct
  misc_feature 1..20: note = Description of Artificial Sequence: Synthetic oligonucleotide
  misc_feature 1..20: note = Target: ANGPTL3; (+) strand; PAM type: NRG; PAM sequence: GAG
  source 1..20: mol_type = other DNA
ctttaatatcagcactttga

SEQ ID NO: 8883 - DNA, 20 bp, synthetic construct
  misc_feature 1..20: note = Description of Artificial Sequence: Synthetic oligonucleotide
  misc_feature 1..20: note = Target: ANGPTL3; (+) strand; PAM type: NRG; PAM sequence: AGG
  source 1..20: mol_type = other DNA
tttaatatcagcactttgag

SEQ ID NO: 8884 - DNA, 20 bp, synthetic construct
  misc_feature 1..20: note = Description of Artificial Sequence: Synthetic oligonucleotide
  misc_feature 1..20: note = Target: ANGPTL3; (+) strand; PAM type: NRG; PAM sequence: TGG
  source 1..20: mol_type = other DNA
agcactttgagaggctgata

SEQ ID NO: 8885 - DNA, 20 bp, synthetic construct
  misc_feature 1..20: note = Description of Artificial Sequence: Synthetic oligonucleotide
  misc_feature 1..20: note = Target: ANGPTL3; (+) strand; PAM type: NRG; PAM sequence: GGG
  source 1..20: mol_type = other DNA
gcactttgagaggctgatat

SEQ ID NO: 8886 - DNA, 20 bp, synthetic construct
  misc_feature 1..20: note = Description of Artificial Sequence: Synthetic oligonucleotide
  misc_feature 1..20: note = Target: ANGPTL3; (+) strand; PAM type: NRG; PAM sequence: GAG
  source 1..20: mol_type = other DNA
actttgagaggctgatatgg

SEQ ID NO: 8887 - DNA, 20 bp, synthetic construct
  misc_feature 1..20: note = Description of Artificial Sequence: Synthetic oligonucleotide
  misc_feature 1..20: note = Target: ANGPTL3; (+) strand; PAM type: NRG; PAM sequence: AGG
  source 1..20: mol_type = other DNA
ctttgagaggctgatatggg

SEQ ID NO: 8888 - DNA, 20 bp, synthetic construct
  misc_feature 1..20: note = Description of Artificial Sequence: Synthetic oligonucleotide
  misc_feature 1..20: note = Target: ANGPTL3; (+) strand; PAM type: NRG; PAM sequence: AAG
  source 1..20: mol_type = other DNA
tgatatgggaggttcacttg

SEQ ID NO: 8889 - DNA, 20 bp, synthetic construct
  misc_feature 1..20: note = Description of Artificial Sequence: Synthetic oligonucleotide
  misc_feature 1..20: note = Target: ANGPTL3; (+) strand; PAM type: NRG; PAM sequence: CAG
  source 1..20: mol_type = other DNA
atgggaggttcacttgaagt

SEQ ID NO: 8890 - DNA, 20 bp, synthetic construct
  misc_feature 1..20: note = Description of Artificial Sequence: Synthetic oligonucleotide
  misc_feature 1..20: note = Target: ANGPTL3; (+) strand; PAM type: NRG; PAM sequence: AGG
  source 1..20: mol_type = other DNA
tgggaggttcacttgaagtc

SEQ ID NO: 8891 - DNA, 20 bp, synthetic construct
  misc_feature 1..20: note = Description of Artificial Sequence: Synthetic oligonucleotide
  misc_feature 1..20: note = Target: ANGPTL3; (+) strand; PAM type: NRG; PAM sequence: GAG
  source 1..20: mol_type = other DNA
ggaggttcacttgaagtcag

SEQ ID NO: 8892 - DNA, 20 bp, synthetic construct
  misc_feature 1..20: note = Description of Artificial Sequence: Synthetic oligonucleotide
  misc_feature 1..20: note = Target: ANGPTL3; (+) strand; PAM type: NRG; PAM sequence: AAG
  source 1..20: mol_type = other DNA
tcacttgaagtcaggagttc

SEQ ID NO: 8893 - DNA, 20 bp, synthetic construct
  misc_feature 1..20: note = Description of Artificial Sequence: Synthetic oligonucleotide
  misc_feature 1..20: note = Target: ANGPTL3; (+) strand; PAM type: NRG; PAM sequence: AGG
  source 1..20: mol_type = other DNA
cacttgaagtcaggagttca

SEQ ID NO: 8894 - DNA, 20 bp, synthetic construct
  misc_feature 1..20: note = Description of Artificial Sequence: Synthetic oligonucleotide
  misc_feature 1..20: note = Target: ANGPTL3; (+) strand; PAM type: NRG; PAM sequence: CAG
  source 1..20: mol_type = other DNA
tgaagtcaggagttcaaggt

SEQ ID NO: 8895 - DNA, 20 bp, synthetic construct
  misc_feature 1..20: note = Description of Artificial Sequence: Synthetic oligonucleotide
  misc_feature 1..20: note = Target: ANGPTL3; (+) strand; PAM type: NRG; PAM sequence: TGG
  source 1..20: mol_type = other DNA
tcaggagttcaaggtcagct

SEQ ID NO: 8896 - DNA, 20 bp, synthetic construct
  misc_feature 1..20: note = Description of Artificial Sequence: Synthetic oligonucleotide
  misc_feature 1..20: note = Target: ANGPTL3; (+) strand; PAM type: NRG; PAM sequence: GGG
  source 1..20: mol_type = other DNA
caggagttcaaggtcagctt

SEQ ID NO: 8897 - DNA, 20 bp, synthetic construct
  misc_feature 1..20: note = Description of Artificial Sequence: Synthetic oligonucleotide
  misc_feature 1..20: note = Target: ANGPTL3; (+) strand; PAM type: NRG; PAM sequence: TAG
  source 1..20: mol_type = other DNA
caaggtcagcttgggcaaca

SEQ ID NO: 8898 - DNA, 20 bp, synthetic construct
  misc_feature 1..20: note = Description of Artificial Sequence: Synthetic oligonucleotide
  misc_feature 1..20: note = Target: ANGPTL3; (+) strand; PAM type: NRG; PAM sequence: CAG
  source 1..20: mol_type = other DNA
ttgggcaacatagtgaaaca

SEQ ID NO: 8899 - DNA, 20 bp, synthetic construct
  misc_feature 1..20: note = Description of Artificial Sequence: Synthetic oligonucleotide
  misc_feature 1..20: note = Target: ANGPTL3; (+) strand; PAM type: NRG; PAM sequence: TAG
  source 1..20: mol_type = other DNA
tctacaaaatatttaaaaat

SEQ ID NO: 8900 - DNA, 20 bp, synthetic construct
  misc_feature 1..20: note = Description of Artificial Sequence: Synthetic oligonucleotide
  misc_feature 1..20: note = Target: ANGPTL3; (+) strand; PAM type: NRG; PAM sequence: TGG
  source 1..20: mol_type = other DNA
caaaatatttaaaaattagc

SEQ ID NO: 8901 - DNA, 20 bp, synthetic construct
  misc_feature 1..20: note = Description of Artificial Sequence: Synthetic oligonucleotide
  misc_feature 1..20: note = Target: ANGPTL3; (+) strand; PAM type: NRG; PAM sequence: GGG
  source 1..20: mol_type = other DNA
aaaatatttaaaaattagct

SEQ ID NO: 8902 - DNA, 20 bp, synthetic construct
  misc_feature 1..20: note = Description of Artificial Sequence: Synthetic oligonucleotide
  misc_feature 1..20: note = Target: ANGPTL3; (+) strand; PAM type: NRG; PAM sequence: TGG
  source 1..20: mol_type = other DNA
atttaaaaattagctgggtg

SEQ ID NO: 8903 - DNA, 20 bp, synthetic construct
  misc_feature 1..20: note = Description of Artificial Sequence: Synthetic oligonucleotide
  misc_feature 1..20: note = Target: ANGPTL3; (+) strand; PAM type: NRG; PAM sequence: TGG
  source 1..20: mol_type = other DNA
taaaaattagctgggtgtgg

SEQ ID NO: 8904 - DNA, 20 bp, synthetic construct
  misc_feature 1..20: note = Description of Artificial Sequence: Synthetic oligonucleotide
  misc_feature 1..20: note = Target: ANGPTL3; (+) strand; PAM type: NRG; PAM sequence: TAG
  source 1..20: mol_type = other DNA
ggtgtggtggcatgcatcta

SEQ ID NO: 8905 - DNA, 20 bp, synthetic construct
  misc_feature 1..20: note = Description of Artificial Sequence: Synthetic oligonucleotide
  misc_feature 1..20: note = Target: ANGPTL3; (+) strand; PAM type: NRG; PAM sequence: CAG
  source 1..20: mol_type = other DNA
gtggcatgcatctatagtct

SEQ ID NO: 8906 - DNA, 20 bp, synthetic construct
  misc_feature 1..20: note = Description of Artificial Sequence: Synthetic oligonucleotide
  misc_feature 1..20: note = Target: ANGPTL3; (+) strand; PAM type: NRG; PAM sequence: TGG
  source 1..20: mol_type = other DNA
catctatagtctcagctact

SEQ ID NO: 8907 - DNA, 20 bp, synthetic construct
  misc_feature 1..20: note = Description of Artificial Sequence: Synthetic oligonucleotide
  misc_feature 1..20: note = Target: ANGPTL3; (+) strand; PAM type: NRG; PAM sequence: GGG
  source 1..20: mol_type = other DNA
atctatagtctcagctactt

SEQ ID NO: 8908 - DNA, 20 bp, synthetic construct
  misc_feature 1..20: note = Description of Artificial Sequence: Synthetic oligonucleotide
  misc_feature 1..20: note = Target: ANGPTL3; (+) strand; PAM type: NRG; PAM sequence: GAG
  source 1..20: mol_type = other DNA
ctatagtctcagctacttgg

SEQ ID NO: 8909 - DNA, 20 bp, synthetic construct
  misc_feature 1..20: note = Description of Artificial Sequence: Synthetic oligonucleotide
  misc_feature 1..20: note = Target: ANGPTL3; (+) strand; PAM type: NRG; PAM sequence: CAG
  source 1..20: mol_type = other DNA
agtctcagctacttgggaga

SEQ ID NO: 8910 - DNA, 20 bp, synthetic construct
  misc_feature 1..20: note = Description of Artificial Sequence: Synthetic oligonucleotide
  misc_feature 1..20: note = Target: ANGPTL3; (+) strand; PAM type: NRG; PAM sequence: GAG
  source 1..20: mol_type = other DNA
tctcagctacttgggagaca

SEQ ID NO: 8911 - DNA, 20 bp, synthetic construct
  misc_feature 1..20: note = Description of Artificial Sequence: Synthetic oligonucleotide
  misc_feature 1..20: note = Target: ANGPTL3; (+) strand; PAM type: NRG; PAM sequence: AGG
  source 1..20: mol_type = other DNA
ctcagctacttgggagacag

SEQ ID NO: 8912 - DNA, 20 bp, synthetic construct
  misc_feature 1..20: note = Description of Artificial Sequence: Synthetic oligonucleotide
  misc_feature 1..20: note = Target: ANGPTL3; (+) strand; PAM type: NRG; PAM sequence: GGG
  source 1..20: mol_type = other DNA
tcagctacttgggagacaga

SEQ ID NO: 8913 - DNA, 20 bp, synthetic construct
  misc_feature 1..20: note = Description of Artificial Sequence: Synthetic oligonucleotide
  misc_feature 1..20: note = Target: ANGPTL3; (+) strand; PAM type: NRG; PAM sequence: GAG
  source 1..20: mol_type = other DNA
agctacttgggagacagagg

SEQ ID NO: 8914 - DNA, 20 bp, synthetic construct
  misc_feature 1..20: note = Description of Artificial Sequence: Synthetic oligonucleotide
  misc_feature 1..20: note = Target: ANGPTL3; (+) strand; PAM type: NRG; PAM sequence: AGG
  source 1..20: mol_type = other DNA
gctacttgggagacagaggg

SEQ ID NO: 8915 - DNA, 20 bp, synthetic construct
  misc_feature 1..20: note = Description of Artificial Sequence: Synthetic oligonucleotide
  misc_feature 1..20: note = Target: ANGPTL3; (+) strand; PAM type: NRG; PAM sequence: GAG
  source 1..20: mol_type = other DNA
tacttgggagacagagggag

SEQ ID NO: 8916 - DNA, 20 bp, synthetic construct
  misc_feature 1..20: note = Description of Artificial Sequence: Synthetic oligonucleotide
  misc_feature 1..20: note = Target: ANGPTL3; (+) strand; PAM type: NRG; PAM sequence: AGG
  source 1..20: mol_type = other DNA
acttgggagacagagggagg

SEQ ID NO: 8917 - DNA, 20 bp, synthetic construct
  misc_feature 1..20: note = Description of Artificial Sequence: Synthetic oligonucleotide
  misc_feature 1..20: note = Target: ANGPTL3; (+) strand; PAM type: NRG; PAM sequence: GAG
  source 1..20: mol_type = other DNA
cagagggaggaggcttgctc

SEQ ID NO: 8918 - DNA, 20 bp, synthetic construct
  misc_feature 1..20: note = Description of Artificial Sequence: Synthetic oligonucleotide
  misc_feature 1..20: note = Target: ANGPTL3; (+) strand; PAM type: NRG; PAM sequence: CAG
  source 1..20: mol_type = other DNA
ggaggaggcttgctcgagcc

SEQ ID NO: 8919 - DNA, 20 bp, synthetic construct
  misc_feature 1..20: note = Description of Artificial Sequence: Synthetic oligonucleotide
  misc_feature 1..20: note = Target: ANGPTL3; (+) strand; PAM type: NRG; PAM sequence: AGG
  source 1..20: mol_type = other DNA
gaggaggcttgctcgagccc

SEQ ID NO: 8920 - DNA, 20 bp, synthetic construct
  misc_feature 1..20: note = Description of Artificial Sequence: Synthetic oligonucleotide
  misc_feature 1..20: note = Target: ANGPTL3; (+) strand; PAM type: NRG; PAM sequence: GAG
  source 1..20: mol_type = other DNA
ggaggcttgctcgagcccag

SEQ ID NO: 8921 - DNA, 20 bp, synthetic construct
  misc_feature 1..20: note = Description of Artificial Sequence: Synthetic oligonucleotide
  misc_feature 1..20: note = Target: ANGPTL3; (+) strand; PAM type: NRG; PAM sequence: TGG
  source 1..20: mol_type = other DNA
tgctcgagcccaggagttcg

SEQ ID NO: 8922 - DNA, 20 bp, synthetic construct
  misc_feature 1..20: note = Description of Artificial Sequence: Synthetic oligonucleotide
  misc_feature 1..20: note = Target: ANGPTL3; (+) strand; PAM type: NRG; PAM sequence: TAG
  source 1..20: mol_type = other DNA
agcccaggagttcgtggcta

SEQ ID NO: 8923 - DNA, 20 bp, synthetic construct
  misc_feature 1..20: note = Description of Artificial Sequence: Synthetic oligonucleotide
  misc_feature 1..20: note = Target: ANGPTL3; (+) strand; PAM type: NRG; PAM sequence: GAG
  source 1..20: mol_type = other DNA
caggagttcgtggctatagt

SEQ ID NO: 8924 - DNA, 20 bp, synthetic construct
  misc_feature 1..20: note = Description of Artificial Sequence: Synthetic oligonucleotide
  misc_feature 1..20: note = Target: ANGPTL3; (+) strand; PAM type: NRG; PAM sequence: CAG
  source 1..20: mol_type = other DNA
atgatcatgccactgcactc

SEQ ID NO: 8925 - DNA, 20 bp, synthetic construct
  misc_feature 1..20: note = Description of Artificial Sequence: Synthetic oligonucleotide
  misc_feature 1..20: note = Target: ANGPTL3; (+) strand; PAM type: NRG; PAM sequence: TGG
  source 1..20: mol_type = other DNA
catgccactgcactccagcc

SEQ ID NO: 8926 - DNA, 20 bp, synthetic construct
  misc_feature 1..20: note = Description of Artificial Sequence: Synthetic oligonucleotide
  misc_feature 1..20: note = Target: ANGPTL3; (+) strand; PAM type: NRG; PAM sequence: CAG
  source 1..20: mol_type = other DNA
ctgcactccagcctggacaa

SEQ ID NO: 8927 - DNA, 20 bp, synthetic construct
  misc_feature 1..20: note = Description of Artificial Sequence: Synthetic oligonucleotide
  misc_feature 1..20: note = Target: ANGPTL3; (+) strand; PAM type: NRG; PAM sequence: GAG
  source 1..20: mol_type = other DNA
gcactccagcctggacaaca

SEQ ID NO: 8928 - DNA, 20 bp, synthetic construct
  misc_feature 1..20: note = Description of Artificial Sequence: Synthetic oligonucleotide
  misc_feature 1..20: note = Target: ANGPTL3; (+) strand; PAM type: NRG; PAM sequence: AAG
  source 1..20: mol_type = other DNA
tccagcctggacaacagagc

SEQ ID NO: 8929 - DNA, 20 bp, synthetic construct
  misc_feature 1..20: note = Description of Artificial Sequence: Synthetic oligonucleotide
  misc_feature 1..20: note = Target: ANGPTL3; (+) strand; PAM type: NRG; PAM sequence: AAG
  source 1..20: mol_type = other DNA
gcaagaccctgtctctaaaa

SEQ ID NO: 8930 - DNA, 20 bp, synthetic construct
  misc_feature 1..20: note = Description of Artificial Sequence: Synthetic oligonucleotide
  misc_feature 1..20: note = Target: ANGPTL3; (+) strand; PAM type: NRG; PAM sequence: AAG
  source 1..20: mol_type = other DNA
accctgtctctaaaaaagaa

SEQ ID NO: 8931 - DNA, 20 bp, synthetic construct
  misc_feature 1..20: note = Description of Artificial Sequence: Synthetic oligonucleotide
  misc_feature 1..20: note = Target: ANGPTL3; (+) strand; PAM type: NRG; PAM sequence: TGG
  source 1..20: mol_type = other DNA
tctaaaaaagaaaagaaatt

SEQ ID NO: 8932 - DNA, 20 bp, synthetic construct
  misc_feature 1..20: note = Description of Artificial Sequence: Synthetic oligonucleotide
  misc_feature 1..20: note = Target: ANGPTL3; (+) strand; PAM type: NRG; PAM sequence: TGG
  source 1..20: mol_type = other DNA
aaagaaaagaaatttggaaa

SEQ ID NO: 8933 - DNA, 20 bp, synthetic construct
  misc_feature 1..20: note = Description of Artificial Sequence: Synthetic oligonucleotide
  misc_feature 1..20: note = Target: ANGPTL3; (+) strand; PAM type: NRG; PAM sequence: AAG
  source 1..20: mol_type = other DNA
aaacttttccctgtgttaaa

SEQ ID NO: 8934 - DNA, 20 bp, synthetic construct
  misc_feature 1..20: note = Description of Artificial Sequence: Synthetic oligonucleotide
  misc_feature 1..20: note = Target: ANGPTL3; (+) strand; PAM type: NRG; PAM sequence: TAG
  source 1..20: mol_type = other DNA
actttatgaaaaatttcttt

SEQ ID NO: 8935 - DNA, 20 bp, synthetic construct
  misc_feature 1..20: note = Description of Artificial Sequence: Synthetic oligonucleotide
  misc_feature 1..20: note = Target: ANGPTL3; (+) strand; PAM type: NRG; PAM sequence: AGG
  source 1..20: mol_type = other DNA
ctttatgaaaaatttctttt

SEQ ID NO: 8936 - DNA, 20 bp, synthetic construct
  misc_feature 1..20: note = Description of Artificial Sequence: Synthetic oligonucleotide
  misc_feature 1..20: note = Target: ANGPTL3; (+) strand; PAM type: NRG; PAM sequence: AAG
  source 1..20: mol_type = other DNA
atgaaaaatttcttttaggt

SEQ ID NO: 8937 - DNA, 20 bp, synthetic construct
  misc_feature 1..20: note = Description of Artificial Sequence: Synthetic oligonucleotide
  misc_feature 1..20: note = Target: ANGPTL3; (+) strand; PAM type: NRG; PAM sequence: AGG
  source 1..20: mol_type = other DNA
tgaaaaatttcttttaggta

SEQ ID NO: 8938 - DNA, 20 bp, synthetic construct
  misc_feature 1..20: note = Description of Artificial Sequence: Synthetic oligonucleotide
  misc_feature 1..20: note = Target: ANGPTL3; (+) strand; PAM type: NRG; PAM sequence: CAG
  source 1..20: mol_type = other DNA
tatatacccacacacataca

SEQ ID NO: 8939 - DNA, 20 bp, synthetic construct
  misc_feature 1..20: note = Description of Artificial Sequence: Synthetic oligonucleotide
  misc_feature 1..20: note = Target: ANGPTL3; (+) strand; PAM type: NRG; PAM sequence: AGG
  source 1..20: mol_type = other DNA
atatacccacacacatacac

SEQ ID NO: 8940 - DNA, 20 bp, synthetic construct
  misc_feature 1..20: note = Description of Artificial Sequence: Synthetic oligonucleotide
  misc_feature 1..20: note = Target: ANGPTL3; (+) strand; PAM type: NRG; PAM sequence: AAG
  source 1..20: mol_type = other DNA
cacacacatacacaggttaa

SEQ ID NO: 8941 - DNA, 20 bp, synthetic construct
  misc_feature 1..20: note = Description of Artificial Sequence: Synthetic oligonucleotide
  misc_feature 1..20: note = Target: ANGPTL3; (+) strand; PAM type: NRG; PAM sequence: TAG
  source 1..20: mol_type = other DNA
cacatacacaggttaaaagt

SEQ ID NO: 8942 - DNA, 20 bp, synthetic construct
  misc_feature 1..20: note = Description of Artificial Sequence: Synthetic oligonucleotide
  misc_feature 1..20: note = Target: ANGPTL3; (+) strand; PAM type: NRG; PAM sequence: TAG
  source 1..20: mol_type = other DNA
gtttcatgtgacataataac

SEQ ID NO: 8943 - DNA, 20 bp, synthetic construct
  misc_feature 1..20: note = Description of Artificial Sequence: Synthetic oligonucleotide
  misc_feature 1..20: note = Target: ANGPTL3; (+) strand; PAM type: NRG; PAM sequence: GAG
  source 1..20: mol_type = other DNA
gacataataactagcatttt

SEQ ID NO: 8944 - DNA, 20 bp, synthetic construct
  misc_feature 1..20: note = Description of Artificial Sequence: Synthetic oligonucleotide
  misc_feature 1..20: note = Target: ANGPTL3; (+) strand; PAM type: NRG; PAM sequence: CAG
  source 1..20: mol_type = other DNA
ttgagcactacctgtttgcc

SEQ ID NO: 8945 - DNA, 20 bp, synthetic construct
  misc_feature 1..20: note = Description of Artificial Sequence: Synthetic oligonucleotide
  misc_feature 1..20: note = Target: ANGPTL3; (+) strand; PAM type: NRG; PAM sequence: AAG
  source 1..20: mol_type = other DNA
tgtttgcccagcactgttct

SEQ ID NO: 8946 - DNA, 20 bp, synthetic construct
  misc_feature 1..20: note = Description of Artificial Sequence: Synthetic oligonucleotide
  misc_feature 1..20: note = Target: ANGPTL3; (+) strand; PAM type: NRG; PAM sequence: CAG
  source 1..20: mol_type = other DNA
attatgtactataattaccc

SEQ ID NO: 8947 - DNA, 20 bp, synthetic construct
  misc_feature 1..20: note = Description of Artificial Sequence: Synthetic oligonucleotide
  misc_feature 1..20: note = Target: ANGPTL3; (+) strand; PAM type: NRG; PAM sequence: CAG
  source 1..20: mol_type = other DNA
ctataattaccccagcttta

SEQ ID NO: 8948 - DNA, 20 bp, synthetic construct
  misc_feature 1..20: note = Description of Artificial Sequence: Synthetic oligonucleotide
  misc_feature 1..20: note = Target: ANGPTL3; (+) strand; PAM type: NRG; PAM sequence: GAG
  source 1..20: mol_type = other DNA
attaccccagctttacagat

SEQ ID NO: 8949 - DNA, 20 bp, synthetic construct
  misc_feature 1..20: note = Description of Artificial Sequence: Synthetic oligonucleotide
  misc_feature 1..20: note = Target: ANGPTL3; (+) strand; PAM type: NRG; PAM sequence: AGG
  source 1..20: mol_type = other DNA
ttaccccagctttacagatg

SEQ ID NO: 8950 - DNA, 20 bp, synthetic construct
  misc_feature 1..20: note = Description of Artificial Sequence: Synthetic oligonucleotide
  misc_feature 1..20: note = Target: ANGPTL3; (+) strand; PAM type: NRG; PAM sequence: GAG
  source 1..20: mol_type = other DNA
accccagctttacagatgag

SEQ ID NO: 8951 - DNA, 20 bp, synthetic construct
  misc_feature 1..20: note = Description of Artificial Sequence: Synthetic oligonucleotide
  misc_feature 1..20: note = Target: ANGPTL3; (+) strand; PAM type: NRG; PAM sequence: TGG
  source 1..20: mol_type = other DNA
cagatgaggagactaatcca

SEQ ID NO: 8952 - DNA, 20 bp, synthetic construct
  misc_feature 1..20: note = Description of Artificial Sequence: Synthetic oligonucleotide
  misc_feature 1..20: note = Target: ANGPTL3; (+) strand; PAM type: NRG; PAM sequence: GGG
  source 1..20: mol_type = other DNA
agatgaggagactaatccat

SEQ ID NO: 8953 - DNA, 20 bp, synthetic construct
  misc_feature 1..20: note = Description of Artificial Sequence: Synthetic oligonucleotide
  misc_feature 1..20: note = Target: ANGPTL3; (+) strand; PAM type: NRG; PAM sequence: GGG
  source 1..20: mol_type = other DNA
gatgaggagactaatccatg

SEQ ID NO: 8954 - DNA, 20 bp, synthetic construct
  misc_feature 1..20: note = Description of Artificial Sequence: Synthetic oligonucleotide
  misc_feature 1..20: note = Target: ANGPTL3; (+) strand; PAM type: NRG; PAM sequence: GAG
  source 1..20: mol_type = other DNA
tgaggagactaatccatggg

SEQ ID NO: 8955 - DNA, 20 bp, synthetic construct
  misc_feature 1..20: note = Description of Artificial Sequence: Synthetic oligonucleotide
  misc_feature 1..20: note = Target: ANGPTL3; (+) strand; PAM type: NRG; PAM sequence: AGG
  source 1..20: mol_type = other DNA
gaggagactaatccatgggg

SEQ ID NO: 8956 - DNA, 20 bp, synthetic construct
  misc_feature 1..20: note = Description of Artificial Sequence: Synthetic oligonucleotide
  misc_feature 1..20: note = Target: ANGPTL3; (+) strand; PAM type: NRG; PAM sequence: AAG
  source 1..20: mol_type = other DNA
gactaatccatggggaggtt

SEQ ID NO: 8957 - DNA, 20 bp, synthetic construct
  misc_feature 1..20: note = Description of Artificial Sequence: Synthetic oligonucleotide
  misc_feature 1..20: note = Target: ANGPTL3; (+) strand; PAM type: NRG; PAM sequence: AAG
  source 1..20: mol_type = other DNA
ggaggttaagtaacttgtcc

SEQ ID NO: 8958 - DNA, 20 bp, synthetic construct
  misc_feature 1..20: note = Description of Artificial Sequence: Synthetic oligonucleotide
  misc_feature 1..20: note = Target: ANGPTL3; (+) strand; PAM type: NRG; PAM sequence: AGG
  source 1..20: mol_type = other DNA
gaggttaagtaacttgtcca

SEQ ID NO: 8959 - DNA, 20 bp, synthetic construct
  misc_feature 1..20: note = Description of Artificial Sequence: Synthetic oligonucleotide
  misc_feature 1..20: note = Target: ANGPTL3; (+) strand; PAM type: NRG; PAM sequence: CAG
  source 1..20: mol_type = other DNA
ttaagtaacttgtccaaggc

SEQ ID NO: 8960 - DNA, 20 bp, synthetic construct
  misc_feature 1..20: note = Description of Artificial Sequence: Synthetic oligonucleotide
  misc_feature 1..20: note = Target: ANGPTL3; (+) strand; PAM type: NRG; PAM sequence: CAG
  source 1..20: mol_type = other DNA
gtaacttgtccaaggccaga

SEQ ID NO: 8961 - DNA, 20 bp, synthetic construct
  misc_feature 1..20: note = Description of Artificial Sequence: Synthetic oligonucleotide
  misc_feature 1..20: note = Target: ANGPTL3; (+) strand; PAM type: NRG; PAM sequence: TAG
  source 1..20: mol_type = other DNA
cttgtccaaggccagacagc

SEQ ID NO: 8962 - DNA, 20 bp, synthetic construct
  misc_feature 1..20: note = Description of Artificial Sequence: Synthetic oligonucleotide
  misc_feature 1..20: note = Target: ANGPTL3; (+) strand; PAM type: NRG; PAM sequence: GAG
  source 1..20: mol_type = other DNA
tgtccaaggccagacagcta

SEQ ID NO: 8963 - DNA, 20 bp, synthetic construct
  misc_feature 1..20: note = Description of Artificial Sequence: Synthetic oligonucleotide
  misc_feature 1..20: note = Target: ANGPTL3; (+) strand; PAM type: NRG; PAM sequence: CGG
  source 1..20: mol_type = other DNA
caaggccagacagctagagc

SEQ ID NO: 8964 - DNA, 20 bp, synthetic construct
  misc_feature 1..20: note = Description of Artificial Sequence: Synthetic oligonucleotide
  misc_feature 1..20: note = Target: ANGPTL3; (+) strand; PAM type: NRG; PAM sequence: TGG
  source 1..20: mol_type = other DNA
agacagctagagccggcttt

SEQ ID NO: 8965 - DNA, 20 bp, synthetic construct
  misc_feature 1..20: note = Description of Artificial Sequence: Synthetic oligonucleotide
  misc_feature 1..20: note = Target: ANGPTL3; (+) strand; PAM type: NRG; PAM sequence: CAG
  source 1..20: mol_type = other DNA
cggcttttggacccacacca

SEQ ID NO: 8966 - DNA, 20 bp, synthetic construct
  misc_feature 1..20: note = Description of Artificial Sequence: Synthetic oligonucleotide
  misc_feature 1..20: note = Target: ANGPTL3; (+) strand; PAM type: NRG; PAM sequence: CAG
  source 1..20: mol_type = other DNA
cccacaccacagtctgactc

SEQ ID NO: 8967 - DNA, 20 bp, synthetic construct
  misc_feature 1..20: note = Description of Artificial Sequence: Synthetic oligonucleotide
  misc_feature 1..20: note = Target: ANGPTL3; (+) strand; PAM type: NRG; PAM sequence: AAG
  source 1..20: mol_type = other DNA
tttcaccatattaatatgtc

SEQ ID NO: 8968 - DNA, 20 bp, synthetic construct
  misc_feature 1..20: note = Description of Artificial Sequence: Synthetic oligonucleotide
  misc_feature 1..20: note = Target: ANGPTL3; (+) strand; PAM type: NRG; PAM sequence: AAG
  source 1..20: mol_type = other DNA
catattaatatgtcaagatt

SEQ ID NO: 8969 - DNA, 20 bp, synthetic construct
  misc_feature 1..20: note = Description of Artificial Sequence: Synthetic oligonucleotide
  misc_feature 1..20: note = Target: ANGPTL3; (+) strand; PAM type: NRG; PAM sequence: CAG
  source 1..20: mol_type = other DNA
attaatatgtcaagattaag

SEQ ID NO: 8970 - DNA, 20 bp, synthetic construct
  misc_feature 1..20: note = Description of Artificial Sequence: Synthetic oligonucleotide
  misc_feature 1..20: note = Target: ANGPTL3; (+) strand; PAM type: NRG; PAM sequence: AAG
  source 1..20: mol_type = other DNA
gtcaagattaagcagtttta

SEQ ID NO: 8971 - DNA, 20 bp, synthetic construct
  misc_feature 1..20: note = Description of Artificial Sequence: Synthetic oligonucleotide
  misc_feature 1..20: note = Target: ANGPTL3; (+) strand; PAM type: NRG; PAM sequence: AGG
  source 1..20: mol_type = other DNA
tcaagattaagcagttttaa

SEQ ID NO: 8972 - DNA, 20 bp, synthetic construct
  misc_feature 1..20: note = Description of Artificial Sequence: Synthetic oligonucleotide
  misc_feature 1..20: note = Target: ANGPTL3; (+) strand; PAM type: NRG; PAM sequence: AAG
  source 1..20: mol_type = other DNA
tcttaatatgaacactcaat

SEQ ID NO: 8973 - DNA, 20 bp, synthetic construct
  misc_feature 1..20: note = Description of Artificial Sequence: Synthetic oligonucleotide
  misc_feature 1..20: note = Target: ANGPTL3; (+) strand; PAM type: NRG; PAM sequence: AAG
  source 1..20: mol_type = other DNA
ataagaataatcactaatat

SEQ ID NO: 8974 - DNA, 20 bp, synthetic construct
  misc_feature 1..20: note = Description of Artificial Sequence: Synthetic oligonucleotide
  misc_feature 1..20: note = Target: ANGPTL3; (+) strand; PAM type: NRG; PAM sequence: TAG
  source 1..20: mol_type = other DNA
taatcactaatataagcatt

SEQ ID NO: 8975 - DNA, 20 bp, synthetic construct
  misc_feature 1..20: note = Description of Artificial Sequence: Synthetic oligonucleotide
  misc_feature 1..20: note = Target: ANGPTL3; (+) strand; PAM type: NRG; PAM sequence: AAG
  source 1..20: mol_type = other DNA
tttagtatttttttaacact

SEQ ID NO: 8976 - DNA, 20 bp, synthetic construct
  misc_feature 1..20: note = Description of Artificial Sequence: Synthetic oligonucleotide
  misc_feature 1..20: note = Target: ANGPTL3; (+) strand; PAM type: NRG; PAM sequence: TGG
  source 1..20: mol_type = other DNA
gtatttttttaacactaagt

SEQ ID NO: 8977 - DNA, 20 bp, synthetic construct
  misc_feature 1..20: note = Description of Artificial Sequence: Synthetic oligonucleotide
  misc_feature 1..20: note = Target: ANGPTL3; (+) strand; PAM type: NRG; PAM sequence: AAG
  source 1..20: mol_type = other DNA
tttttttaacactaagttgg

SEQ ID NO: 8978 - DNA, 20 bp, synthetic construct
  misc_feature 1..20: note = Description of Artificial Sequence: Synthetic oligonucleotide
  misc_feature 1..20: note = Target: ANGPTL3; (+) strand; PAM type: NRG; PAM sequence: TAG
  source 1..20: mol_type = other DNA
ttaacactaagttggaagca

SEQ ID NO: 8979 - DNA, 20 bp, synthetic construct
  misc_feature 1..20: note = Description of Artificial Sequence: Synthetic oligonucleotide
  misc_feature 1..20: note = Target: ANGPTL3; (+) strand; PAM type: NRG; PAM sequence: TGG
  source 1..20: mol_type = other DNA
acactaagttggaagcatag

SEQ ID NO: 8980 - DNA, 20 bp, synthetic construct
  misc_feature 1..20: note = Description of Artificial Sequence: Synthetic oligonucleotide
  misc_feature 1..20: note = Target: ANGPTL3; (+) strand; PAM type: NRG; PAM sequence: TAG
  source 1..20: mol_type = other DNA
catagtggaacatttatttt

SEQ ID NO: 8981 - DNA, 20 bp, synthetic construct
  misc_feature 1..20: note = Description of Artificial Sequence: Synthetic oligonucleotide
  misc_feature 1..20: note = Target: ANGPTL3; (+) strand; PAM type: NRG; PAM sequence: TGG
  source 1..20: mol_type = other DNA
tttttagaaatattattaat

SEQ ID NO: 8982 - DNA, 20 bp, synthetic construct
  misc_feature 1..20: note = Description of Artificial Sequence: Synthetic oligonucleotide
  misc_feature 1..20: note = Target: ANGPTL3; (+) strand; PAM type: NRG; PAM sequence: TGG
  source 1..20: mol_type = other DNA
tagaaatattattaattggc

SEQ ID NO: 8983 - DNA, 20 bp, synthetic construct
  misc_feature 1..20: note = Description of Artificial Sequence: Synthetic oligonucleotide
  misc_feature 1..20: note = Target: ANGPTL3; (+) strand; PAM type: NRG; PAM sequence: GGG
  source 1..20: mol_type = other DNA
agaaatattattaattggct

SEQ ID NO: 8984 - DNA, 20 bp, synthetic construct
  misc_feature 1..20: note = Description of Artificial Sequence: Synthetic oligonucleotide
  misc_feature 1..20: note = Target: ANGPTL3; (+) strand; PAM type: NRG; PAM sequence: CGG
  source 1..20: mol_type = other DNA
gctgggctcacgcttgtaat

SEQ ID NO: 8985 - DNA, 20 bp, synthetic construct
  misc_feature 1..20: note = Description of Artificial Sequence: Synthetic oligonucleotide
  misc_feature 1..20: note = Target: ANGPTL3; (+) strand; PAM type: NRG; PAM sequence: TGG
  source 1..20: mol_type = other DNA
ggctcacgcttgtaatcggc

SEQ ID NO: 8986 - DNA, 20 bp, synthetic construct
  misc_feature 1..20: note = Description of Artificial Sequence: Synthetic oligonucleotide
  misc_feature 1..20: note = Target: ANGPTL3; (+) strand; PAM type: NRG; PAM sequence: GGG
  source 1..20: mol_type = other DNA
gctcacgcttgtaatcggct

SEQ ID NO: 8987 - DNA, 20 bp, synthetic construct
  misc_feature 1..20: note = Description of Artificial Sequence: Synthetic oligonucleotide
  misc_feature 1..20: note = Target: ANGPTL3; (+) strand; PAM type: NRG; PAM sequence: TGG
  source 1..20: mol_type = other DNA
gggctcatgcctgtaaattt

SEQ ID NO: 8988 - DNA, 20 bp, synthetic construct
  misc_feature 1..20: note = Description of Artificial Sequence: Synthetic oligonucleotide
  misc_feature 1..20: note = Target: ANGPTL3; (+) strand; PAM type: NRG; PAM sequence: GGG
  source 1..20: mol_type = other DNA
ggctcatgcctgtaaatttt

SEQ ID NO: 8989 - DNA, 20 bp, synthetic construct
  misc_feature 1..20: note = Description of Artificial Sequence: Synthetic oligonucleotide
  misc_feature 1..20: note = Target: ANGPTL3; (+) strand; PAM type: NRG; PAM sequence: GAG
  source 1..20: mol_type = other DNA
ctcatgcctgtaaattttgg

SEQ ID NO: 8990 - DNA, 20 bp, synthetic construct
  misc_feature 1..20: note = Description of Artificial Sequence: Synthetic oligonucleotide
  misc_feature 1..20: note = Target: ANGPTL3; (+) strand; PAM type: NRG; PAM sequence: AGG
  source 1..20: mol_type = other DNA
tcatgcctgtaaattttggg

SEQ ID NO: 8991 - DNA, 20 bp, synthetic construct
  misc_feature 1..20: note = Description of Artificial Sequence: Synthetic oligonucleotide
  misc_feature 1..20: note = Target: ANGPTL3; (+) strand; PAM type: NRG; PAM sequence: AAG
  source 1..20: mol_type = other DNA
cctgtaaattttgggaggcc

SEQ ID NO: 8992 - DNA, 20 bp, synthetic construct
  misc_feature 1..20: note = Description of Artificial Sequence: Synthetic oligonucleotide
  misc_feature 1..20: note = Target: ANGPTL3; (+) strand; PAM type: NRG; PAM sequence: AGG
  source 1..20: mol_type = other DNA
ctgtaaattttgggaggcca

SEQ ID NO: 8993 - DNA, 20 bp, synthetic construct
  misc_feature 1..20: note = Description of Artificial Sequence: Synthetic oligonucleotide
  misc_feature 1..20: note = Target: ANGPTL3; (+) strand; PAM type: NRG; PAM sequence: AAG
  source 1..20: mol_type = other DNA
attttgggaggccaaggtaa

SEQ ID NO: 8994 - DNA, 20 bp, synthetic construct
  misc_feature 1..20: note = Description of Artificial Sequence: Synthetic oligonucleotide
  misc_feature 1..20: note = Target: ANGPTL3; (+) strand; PAM type: NRG; PAM sequence: GAG
  source 1..20: mol_type = other DNA
ccaaggtaaaagaattgctt

SEQ ID NO: 8995 - DNA, 20 bp, synthetic construct
  misc_feature 1..20: note = Description of Artificial Sequence: Synthetic oligonucleotide
  misc_feature 1..20: note = Target: ANGPTL3; (+) strand; PAM type: NRG; PAM sequence: CAG
  source 1..20: mol_type = other DNA
gtaaaagaattgcttgagcc

SEQ ID NO: 8996 - DNA, 20 bp, synthetic construct
  misc_feature 1..20: note = Description of Artificial Sequence: Synthetic oligonucleotide
  misc_feature 1..20: note = Target: ANGPTL3; (+) strand; PAM type: NRG; PAM sequence: CAG
  source 1..20: mol_type = other DNA
ttgcttgagcccagtatttc

SEQ ID NO: 8997 - DNA, 20 bp, synthetic construct
  misc_feature 1..20: note = Description of Artificial Sequence: Synthetic oligonucleotide
  misc_feature 1..20: note = Target: ANGPTL3; (+) strand; PAM type: NRG; PAM sequence: CAG
  source 1..20: mol_type = other DNA
tgagcccagtatttccagac

SEQ ID NO: 8998 - DNA, 20 bp, synthetic construct
  misc_feature 1..20: note = Description of Artificial Sequence: Synthetic oligonucleotide
  misc_feature 1..20: note = Target: ANGPTL3; (+) strand; PAM type: NRG; PAM sequence: TGG
  source 1..20: mol_type = other DNA
ccagtatttccagaccagca

SEQ ID NO: 8999 - DNA, 20 bp, synthetic construct
  misc_feature 1..20: note = Description of Artificial Sequence: Synthetic oligonucleotide
  misc_feature 1..20: note = Target: ANGPTL3; (+) strand; PAM type: NRG; PAM sequence: GGG
  source 1..20: mol_type = other DNA
cagtatttccagaccagcat

SEQ ID NO: 9000 - DNA, 20 bp, synthetic construct
  misc_feature 1..20: note = Description of Artificial Sequence: Synthetic oligonucleotide
  misc_feature 1..20: note = Target: ANGPTL3; (+) strand; PAM type: NRG; PAM sequence: AAG
  source 1..20: mol_type = other DNA
accagcatgggcaatacatt

SEQ ID NO: 9001 - DNA, 20 bp, synthetic construct
  misc_feature 1..20: note = Description of Artificial Sequence: Synthetic oligonucleotide
  misc_feature 1..20: note = Target: ANGPTL3; (+) strand; PAM type: NRG; PAM sequence: AAG
  source 1..20: mol_type = other DNA
atattatcaaaattgttact

SEQ ID NO: 9002 - DNA, 20 bp, synthetic construct
  misc_feature 1..20: note = Description of Artificial Sequence: Synthetic oligonucleotide
  misc_feature 1..20: note = Target: ANGPTL3; (+) strand; PAM type: NRG; PAM sequence: CAG
  source 1..20: mol_type = other DNA
gttactaagctaacaaactt

SEQ ID NO: 9003 - DNA, 20 bp, synthetic construct
  misc_feature 1..20: note = Description of Artificial Sequence: Synthetic oligonucleotide
  misc_feature 1..20: note = Target: ANGPTL3; (+) strand; PAM type: NRG; PAM sequence: TGG
  source 1..20: mol_type = other DNA
aacttcagaaaaacttatga

SEQ ID NO: 9004 - DNA, 20 bp, synthetic construct
  misc_feature 1..20: note = Description of Artificial Sequence: Synthetic oligonucleotide
  misc_feature 1..20: note = Target: ANGPTL3; (+) strand; PAM type: NRG; PAM sequence: GGG
  source 1..20: mol_type = other DNA
acttcagaaaaacttatgat

SEQ ID NO: 9005 - DNA, 20 bp, synthetic construct
  misc_feature 1..20: note = Description of Artificial Sequence: Synthetic oligonucleotide
  misc_feature 1..20: note = Target: ANGPTL3; (+) strand; PAM type: NRG; PAM sequence: AAG
  source 1..20: mol_type = other DNA
cagaaaaacttatgatgggc

SEQ ID NO: 9006 - DNA, 20 bp, synthetic construct
  misc_feature 1..20: note = Description of Artificial Sequence: Synthetic oligonucleotide
  misc_feature 1..20: note = Target: ANGPTL3; (+) strand; PAM type: NRG; PAM sequence: AAG
  source 1..20: mol_type = other DNA
gcaagctgcttgtgacattg

SEQ ID NO: 9007 - DNA, 20 bp, synthetic construct
  misc_feature 1..20: note = Description of Artificial Sequence: Synthetic oligonucleotide
  misc_feature 1..20: note = Target: ANGPTL3; (+) strand; PAM type: NRG; PAM sequence: AGG
  source 1..20: mol_type = other DNA
caagctgcttgtgacattga

SEQ ID NO: 9008 - DNA, 20 bp, synthetic construct
  misc_feature 1..20: note = Description of Artificial Sequence: Synthetic oligonucleotide
  misc_feature 1..20: note = Target: ANGPTL3; (+) strand; PAM type: NRG; PAM sequence: AAG
  source 1..20: mol_type = other DNA
ttgtgacattgaaggtattt

SEQ ID NO: 9009 - DNA, 20 bp, synthetic construct
  misc_feature 1..20: note = Description of Artificial Sequence: Synthetic oligonucleotide
  misc_feature 1..20: note = Target: ANGPTL3; (+) strand; PAM type: NRG; PAM sequence: TAG
  source 1..20: mol_type = other DNA
aggtatttaagattcaattc

SEQ ID NO: 9010 - DNA, 20 bp, synthetic construct
  misc_feature 1..20: note = Description of Artificial Sequence: Synthetic oligonucleotide
  misc_feature 1..20: note = Target: ANGPTL3; (+) strand; PAM type: NRG; PAM sequence: TGG
  source 1..20: mol_type = other DNA
tttaagattcaattctagtt

SEQ ID NO: 9011 - DNA, 20 bp, synthetic construct
  misc_feature 1..20: note = Description of Artificial Sequence: Synthetic oligonucleotide
  misc_feature 1..20: note = Target: ANGPTL3; (+) strand; PAM type: NRG; PAM sequence: TAG
  source 1..20: mol_type = other DNA
attcaattctagtttggtcc

SEQ ID NO: 9012 - DNA, 20 bp, synthetic construct
  misc_feature 1..20: note = Description of Artificial Sequence: Synthetic oligonucleotide
  misc_feature 1..20: note = Target: ANGPTL3; (+) strand; PAM type: NRG; PAM sequence: GAG
  source 1..20: mol_type = other DNA
atatccattgttccttcaac

SEQ ID NO: 9013 - DNA, 20 bp, synthetic construct
  misc_feature 1..20: note = Description of Artificial Sequence: Synthetic oligonucleotide
  misc_feature 1..20: note = Target: ANGPTL3; (+) strand; PAM type: NRG; PAM sequence: TGG
  source 1..20: mol_type = other DNA
ttgttccttcaacgagcaca

SEQ ID NO: 9014 - DNA, 20 bp, synthetic construct
  misc_feature 1..20: note = Description of Artificial Sequence: Synthetic oligonucleotide
  misc_feature 1..20: note = Target: ANGPTL3; (+) strand; PAM type: NRG; PAM sequence: AAG
  source 1..20: mol_type = other DNA
ccttcaacgagcacatggta

SEQ ID NO: 9015 - DNA, 20 bp, synthetic construct
  misc_feature 1..20: note = Description of Artificial Sequence: Synthetic oligonucleotide
  misc_feature 1..20: note = Target: ANGPTL3; (+) strand; PAM type: NRG; PAM sequence: GAG
  source 1..20: mol_type = other DNA
ttcaacgagcacatggtaaa

SEQ ID NO: 9016 - DNA, 20 bp, synthetic construct
  misc_feature 1..20: note = Description of Artificial Sequence: Synthetic oligonucleotide
  misc_feature 1..20: note = Target: ANGPTL3; (+) strand; PAM type: NRG; PAM sequence: TAG
  source 1..20: mol_type = other DNA
cgagcacatggtaaagagcc

SEQ ID NO: 9017 - DNA, 20 bp, synthetic construct
  misc_feature 1..20: note = Description of Artificial Sequence: Synthetic oligonucleotide
  misc_feature 1..20: note = Target: ANGPTL3; (+) strand; PAM type: NRG; PAM sequence: CAG
  source 1..20: mol_type = other DNA
atggtaaagagcctagaaca

SEQ ID NO: 9018 - DNA, 20 bp, synthetic construct
  misc_feature 1..20: note = Description of Artificial Sequence: Synthetic oligonucleotide
  misc_feature 1..20: note = Target: ANGPTL3; (+) strand; PAM type: NRG; PAM sequence: GAG
  source 1..20: mol_type = other DNA
ggtaaagagcctagaacaca

SEQ ID NO: 9019 - DNA, 20 bp, synthetic construct
  misc_feature 1..20: note = Description of Artificial Sequence: Synthetic oligonucleotide
  misc_feature 1..20: note = Target: ANGPTL3; (+) strand; PAM type: NRG; PAM sequence: CAG
  source 1..20: mol_type = other DNA
gagcctagaacacagagaca

SEQ ID NO: 9020 - DNA, 20 bp, synthetic construct
  misc_feature 1..20: note = Description of Artificial Sequence: Synthetic oligonucleotide
  misc_feature 1..20: note = Target: ANGPTL3; (+) strand; PAM type: NRG; PAM sequence: CAG
  source 1..20: mol_type = other DNA
gaacacagagacacagaaca

SEQ ID NO: 9021 - DNA, 20 bp, synthetic construct
  misc_feature 1..20: note = Description of Artificial Sequence: Synthetic oligonucleotide
  misc_feature 1..20: note = Target: ANGPTL3; (+) strand; PAM type: NRG; PAM sequence: TGG
  source 1..20: mol_type = other DNA
cacagagacacagaacacag

SEQ ID NO: 9022 - DNA, 20 bp, synthetic construct
  misc_feature 1..20: note = Description of Artificial Sequence: Synthetic oligonucleotide
  misc_feature 1..20: note = Target: ANGPTL3; (+) strand; PAM type: NRG; PAM sequence: GAG
  source 1..20: mol_type = other DNA
cagagacacagaacacagtg

SEQ ID NO: 9023 - DNA, 20 bp, synthetic construct
  misc_feature 1..20: note = Description of Artificial Sequence: Synthetic oligonucleotide
  misc_feature 1..20: note = Target: ANGPTL3; (+) strand; PAM type: NRG; PAM sequence: AAG
  source 1..20: mol_type = other DNA
acacagaacacagtggagaa

SEQ ID NO: 9024 - DNA, 20 bp, synthetic construct
  misc_feature 1..20: note = Description of Artificial Sequence: Synthetic oligonucleotide
  misc_feature 1..20: note = Target: ANGPTL3; (+) strand; PAM type: NRG; PAM sequence: AGG
  source 1..20: mol_type = other DNA
cacagaacacagtggagaaa

SEQ ID NO: 9025 - DNA, 20 bp, synthetic construct
  misc_feature 1..20: note = Description of Artificial Sequence: Synthetic oligonucleotide
  misc_feature 1..20: note = Target: ANGPTL3; (+) strand; PAM type: NRG; PAM sequence: GGG
  source 1..20: mol_type = other DNA
acagaacacagtggagaaaa

SEQ ID NO: 9026 - DNA, 20 bp, synthetic construct
  misc_feature 1..20: note = Description of Artificial Sequence: Synthetic oligonucleotide
  misc_feature 1..20: note = Target: ANGPTL3; (+) strand; PAM type: NRG; PAM sequence: GAG
  source 1..20: mol_type = other DNA
agaacacagtggagaaaagg

SEQ ID NO: 9027 - DNA, 20 bp, synthetic construct
  misc_feature 1..20: note = Description of Artificial Sequence: Synthetic oligonucleotide
  misc_feature 1..20: note = Target: ANGPTL3; (+) strand; PAM type: NRG; PAM sequence: TGG
  source 1..20: mol_type = other DNA
ttaatgacacttactatata

SEQ ID NO: 9028 - DNA, 20 bp, synthetic construct
  misc_feature 1..20: note = Description of Artificial Sequence: Synthetic oligonucleotide
  misc_feature 1..20: note = Target: ANGPTL3; (+) strand; PAM type: NRG; PAM sequence: GGG
  source 1..20: mol_type = other DNA
taatgacacttactatatat

SEQ ID NO: 9029 - DNA, 20 bp, synthetic construct
  misc_feature 1..20: note = Description of Artificial Sequence: Synthetic oligonucleotide
  misc_feature 1..20: note = Target: ANGPTL3; (+) strand; PAM type: NRG; PAM sequence: AAG
  source 1..20: mol_type = other DNA
gggattttgtgacaatatac

SEQ ID NO: 9030 - DNA, 20 bp, synthetic construct
  misc_feature 1..20: note = Description of Artificial Sequence: Synthetic oligonucleotide
  misc_feature 1..20: note = Target: ANGPTL3; (+) strand; PAM type: NRG; PAM sequence: AGG
  source 1..20: mol_type = other DNA
ggattttgtgacaatataca

SEQ ID NO: 9031 - DNA, 20 bp, synthetic construct
  misc_feature 1..20: note = Description of Artificial Sequence: Synthetic oligonucleotide
  misc_feature 1..20: note = Target: ANGPTL3; (+) strand; PAM type: NRG; PAM sequence: TGG
  source 1..20: mol_type = other DNA
tttgtgacaatatacaagga

SEQ ID NO: 9032 - DNA, 20 bp, synthetic construct
  misc_feature 1..20: note = Description of Artificial Sequence: Synthetic oligonucleotide
  misc_feature 1..20: note = Target: ANGPTL3; (+) strand; PAM type: NRG; PAM sequence: AAG
  source 1..20: mol_type = other DNA
gacaatatacaaggatggtt

SEQ ID NO: 9033 - DNA, 20 bp, synthetic construct
  misc_feature 1..20: note = Description of Artificial Sequence: Synthetic oligonucleotide
  misc_feature 1..20: note = Target: ANGPTL3; (+) strand; PAM type: NRG; PAM sequence: AAG
  source 1..20: mol_type = other DNA
caaggatggttaagacatat

SEQ ID NO: 9034 - DNA, 20 bp, synthetic construct
  misc_feature 1..20: note = Description of Artificial Sequence: Synthetic oligonucleotide
  misc_feature 1..20: note = Target: ANGPTL3; (+) strand; PAM type: NRG; PAM sequence: AGG
  source 1..20: mol_type = other DNA
aaggatggttaagacatata

SEQ ID NO: 9035 - DNA, 20 bp, synthetic construct
  misc_feature 1..20: note = Description of Artificial Sequence: Synthetic oligonucleotide
  misc_feature 1..20: note = Target: ANGPTL3; (+) strand; PAM type: NRG; PAM sequence: TAG
  source 1..20: mol_type = other DNA
aaaaaacatattaacaatta

SEQ ID NO: 9036 - DNA, 20 bp, synthetic construct
  misc_feature 1..20: note = Description of Artificial Sequence: Synthetic oligonucleotide
  misc_feature 1..20: note = Target: ANGPTL3; (+) strand; PAM type: NRG; PAM sequence: GAG
  source 1..20: mol_type = other DNA
caattatagtgacaaaaaat

SEQ ID NO: 9037 - DNA, 20 bp, synthetic construct
  misc_feature 1..20: note = Description of Artificial Sequence: Synthetic oligonucleotide
  misc_feature 1..20: note = Target: ANGPTL3; (+) strand; PAM type: NRG; PAM sequence: AGG
  source 1..20: mol_type = other DNA
aattatagtgacaaaaaatg

SEQ ID NO: 9038 - DNA, 20 bp, synthetic construct
  misc_feature 1..20: note = Description of Artificial Sequence: Synthetic oligonucleotide
  misc_feature 1..20: note = Target: ANGPTL3; (+) strand; PAM type: NRG; PAM sequence: GAG
  source 1..20: mol_type = other DNA
ttatagtgacaaaaaatgag

SEQ ID NO: 9039 - DNA, 20 bp, synthetic construct
  misc_feature 1..20: note = Description of Artificial Sequence: Synthetic oligonucleotide
  misc_feature 1..20: note = Target: ANGPTL3; (+) strand; PAM type: NRG; PAM sequence: CAG
  source 1..20: mol_type = other DNA
taattatacattgatttata

SEQ ID NO: 9040 - DNA, 20 bp, synthetic construct
  misc_feature 1..20: note = Description of Artificial Sequence: Synthetic oligonucleotide
  misc_feature 1..20: note = Target: ANGPTL3; (+) strand; PAM type: NRG; PAM sequence: GAG
  source 1..20: mol_type = other DNA
attatacattgatttataca

SEQ ID NO: 9041 - DNA, 20 bp, synthetic construct
  misc_feature 1..20: note = Description of Artificial Sequence: Synthetic oligonucleotide
  misc_feature 1..20: note = Target: ANGPTL3; (+) strand; PAM type: NRG; PAM sequence: CAG
  source 1..20: mol_type = other DNA
cattgatttatacagagtac

SEQ ID NO: 9042 - DNA, 20 bp, synthetic construct
  misc_feature 1..20: note = Description of Artificial Sequence: Synthetic oligonucleotide
  misc_feature 1..20: note = Target: ANGPTL3; (+) strand; PAM type: NRG; PAM sequence: GAG
  source 1..20: mol_type = other DNA
ttgatttatacagagtacca

SEQ ID NO: 9043 - DNA, 20 bp, synthetic construct
  misc_feature 1..20: note = Description of Artificial Sequence: Synthetic oligonucleotide
  misc_feature 1..20: note = Target: ANGPTL3; (+) strand; PAM type: NRG; PAM sequence: AGG
  source 1..20: mol_type = other DNA
tgatttatacagagtaccag

SEQ ID NO: 9044 - DNA, 20 bp, synthetic construct
  misc_feature 1..20: note = Description of Artificial Sequence: Synthetic oligonucleotide
  misc_feature 1..20: note = Target: ANGPTL3; (+) strand; PAM type: NRG; PAM sequence: CAG
  source 1..20: mol_type = other DNA
tacagagtaccagaggaaca

SEQ ID NO: 9045 - DNA, 20 bp, synthetic construct
  misc_feature 1..20: note = Description of Artificial Sequence: Synthetic oligonucleotide
  misc_feature 1..20: note = Target: ANGPTL3; (+) strand; PAM type: NRG; PAM sequence: GAG
  source 1..20: mol_type = other DNA
taccagaggaacacagcatt

SEQ ID NO: 9046 - DNA, 20 bp, synthetic construct
  misc_feature 1..20: note = Description of Artificial Sequence: Synthetic oligonucleotide
  misc_feature 1..20: note = Target: ANGPTL3; (+) strand; PAM type: NRG; PAM sequence: GAG
  source 1..20: mol_type = other DNA
ccagaggaacacagcattga

SEQ ID NO: 9047 - DNA, 20 bp, synthetic construct
  misc_feature 1..20: note = Description of Artificial Sequence: Synthetic oligonucleotide
  misc_feature 1..20: note = Target: ANGPTL3; (+) strand; PAM type: NRG; PAM sequence: GAG
  source 1..20: mol_type = other DNA
tgagagccgtaacaccacct

SEQ ID NO: 9048 - DNA, 20 bp, synthetic construct
  misc_feature 1..20: note = Description of Artificial Sequence: Synthetic oligonucleotide
  misc_feature 1..20: note = Target: ANGPTL3; (+) strand; PAM type: NRG; PAM sequence: AGG
  source 1..20: mol_type = other DNA
gagagccgtaacaccacctg

SEQ ID NO: 9049 - DNA, 20 bp, synthetic construct
  misc_feature 1..20: note = Description of Artificial Sequence: Synthetic oligonucleotide
  misc_feature 1..20: note = Target: ANGPTL3; (+) strand; PAM type: NRG; PAM sequence: GGG
  source 1..20: mol_type = other DNA
agagccgtaacaccacctga

SEQ ID NO: 9050 - DNA, 20 bp, synthetic construct
  misc_feature 1..20: note = Description of Artificial Sequence: Synthetic oligonucleotide
  misc_feature 1..20: note = Target: ANGPTL3; (+) strand; PAM type: NRG; PAM sequence: GAG
  source 1..20: mol_type = other DNA
agccgtaacaccacctgagg

SEQ ID NO: 9051 - DNA, 20 bp, synthetic construct
  misc_feature 1..20: note = Description of Artificial Sequence: Synthetic oligonucleotide
  misc_feature 1..20: note = Target: ANGPTL3; (+) strand; PAM type: NRG; PAM sequence: TGG
  source 1..20: mol_type = other DNA
cgtaacaccacctgagggag

SEQ ID NO: 9052 - DNA, 20 bp, synthetic construct
  misc_feature 1..20: note = Description of Artificial Sequence: Synthetic oligonucleotide
  misc_feature 1..20: note = Target: ANGPTL3; (+) strand; PAM type: NRG; PAM sequence: GAG
  source 1..20: mol_type = other DNA
taacaccacctgagggagtg

SEQ ID NO: 9053 - DNA, 20 bp, synthetic construct
  misc_feature 1..20: note = Description of Artificial Sequence: Synthetic oligonucleotide
  misc_feature 1..20: note = Target: ANGPTL3; (+) strand; PAM type: NRG; PAM sequence: AAG
  source 1..20: mol_type = other DNA
accacctgagggagtggaga

SEQ ID NO: 9054 - DNA, 20 bp, synthetic construct
  misc_feature 1..20: note = Description of Artificial Sequence: Synthetic oligonucleotide
  misc_feature 1..20: note = Target: ANGPTL3; (+) strand; PAM type: NRG; PAM sequence: AGG
  source 1..20: mol_type = other DNA
ccacctgagggagtggagaa

SEQ ID NO: 9055 - DNA, 20 bp, synthetic construct
  misc_feature 1..20: note = Description of Artificial Sequence: Synthetic oligonucleotide
  misc_feature 1..20: note = Target: ANGPTL3; (+) strand; PAM type: NRG; PAM sequence: CAG
  source 1..20: mol_type = other DNA
gagggagtggagaaaggctt

SEQ ID NO: 9056 - DNA, 20 bp, synthetic construct
  misc_feature 1..20: note = Description of Artificial Sequence: Synthetic oligonucleotide
  misc_feature 1..20: note = Target: ANGPTL3; (+) strand; PAM type: NRG; PAM sequence: GAG
  source 1..20: mol_type = other DNA
gggagtggagaaaggcttca

SEQ ID NO: 9057 - DNA, 20 bp, synthetic construct
  misc_feature 1..20: note = Description of Artificial Sequence: Synthetic oligonucleotide
  misc_feature 1..20: note = Target: ANGPTL3; (+) strand; PAM type: NRG; PAM sequence: GAG
  source 1..20: mol_type = other DNA
gagtggagaaaggcttcaga

SEQ ID NO: 9058 - DNA, 20 bp, synthetic construct
  misc_feature 1..20: note = Description of Artificial Sequence: Synthetic oligonucleotide
  misc_feature 1..20: note = Target: ANGPTL3; (+) strand; PAM type: NRG; PAM sequence: AAG
  source 1..20: mol_type = other DNA
ggagaaaggcttcagagaga

SEQ ID NO: 9059 - DNA, 20 bp, synthetic construct
  misc_feature 1..20: note = Description of Artificial Sequence: Synthetic oligonucleotide
  misc_feature 1..20: note = Target: ANGPTL3; (+) strand; PAM type: NRG; PAM sequence: TGG
  source 1..20: mol_type = other DNA
ttcagagagaaagtgttttt

SEQ ID NO: 9060 - DNA, 20 bp, synthetic construct
  misc_feature 1..20: note = Description of Artificial Sequence: Synthetic oligonucleotide
  misc_feature 1..20: note = Target: ANGPTL3; (+) strand; PAM type: NRG; PAM sequence: TGG
  source 1..20: mol_type = other DNA
agagaaagtgttttttggaa

SEQ ID NO: 9061 - DNA, 20 bp, synthetic construct
  misc_feature 1..20: note = Description of Artificial Sequence: Synthetic oligonucleotide
  misc_feature 1..20: note = Target: ANGPTL3; (+) strand; PAM type: NRG; PAM sequence: AAG
  source 1..20: mol_type = other DNA
gaatggatcactgtttccaa

SEQ ID NO: 9062 - DNA, 20 bp, synthetic construct
  misc_feature 1..20: note = Description of Artificial Sequence: Synthetic oligonucleotide
  misc_feature 1..20: note = Target: ANGPTL3; (+) strand; PAM type: NRG; PAM sequence: AAG
  source 1..20: mol_type = other DNA
cactgtttccaaaagaacta

SEQ ID NO: 9063 - DNA, 20 bp, synthetic construct
  misc_feature 1..20: note = Description of Artificial Sequence: Synthetic oligonucleotide
  misc_feature 1..20: note = Target: ANGPTL3; (+) strand; PAM type: NRG; PAM sequence: CAG
  source 1..20: mol_type = other DNA
tttccaaaagaactaaagta

SEQ ID NO: 9064 - DNA, 20 bp, synthetic construct
  misc_feature 1..20: note = Description of Artificial Sequence: Synthetic oligonucleotide
  misc_feature 1..20: note = Target: ANGPTL3; (+) strand; PAM type: NRG; PAM sequence: GAG
  source 1..20: mol_type = other DNA
aaagaactaaagtacagttt

SEQ ID NO: 9065 - DNA, 20 bp, synthetic construct
  misc_feature 1..20: note = Description of Artificial Sequence: Synthetic oligonucleotide
  misc_feature 1..20: note = Target: ANGPTL3; (+) strand; PAM type: NRG; PAM sequence: AAG
  source 1..20: mol_type = other DNA
aataaatttacccaacaaaa

SEQ ID NO: 9066 - DNA, 20 bp, synthetic construct
  misc_feature 1..20: note = Description of Artificial Sequence: Synthetic oligonucleotide
  misc_feature 1..20: note = Target: ANGPTL3; (+) strand; PAM type: NRG; PAM sequence: AAG
  source 1..20: mol_type = other DNA
aatctcttaaaatcataaaa

SEQ ID NO: 9067 - DNA, 20 bp, synthetic construct
  misc_feature 1..20: note = Description of Artificial Sequence: Synthetic oligonucleotide
  misc_feature 1..20: note = Target: ANGPTL3; (+) strand; PAM type: NRG; PAM sequence: TAG
  source 1..20: mol_type = other DNA
aaatcataaaaaagtaaaat

SEQ ID NO: 9068 - DNA, 20 bp, synthetic construct
  misc_feature 1..20: note = Description of Artificial Sequence: Synthetic oligonucleotide
  misc_feature 1..20: note = Target: ANGPTL3; (+) strand; PAM type: NRG; PAM sequence: CAG
  source 1..20: mol_type = other DNA
gtaaaattagcttttaaaaa

SEQ ID NO: 9069 - DNA, 20 bp, synthetic construct
  misc_feature 1..20: note = Description of Artificial Sequence: Synthetic oligonucleotide
  misc_feature 1..20: note = Target: ANGPTL3; (+) strand; PAM type: NRG; PAM sequence: AGG
  source 1..20: mol_type = other DNA
taaaattagcttttaaaaac

SEQ ID NO: 9070 - DNA, 20 bp, synthetic construct
  misc_feature 1..20: note = Description of Artificial Sequence: Synthetic oligonucleotide
  misc_feature 1..20: note = Target: ANGPTL3; (+) strand; PAM type: NRG; PAM sequence: TAG
  source 1..20: mol_type = other DNA
aattagcttttaaaaacagg

SEQ ID NO: 9071 - DNA, 20 bp, synthetic construct
  misc_feature 1..20: note = Description of Artificial Sequence: Synthetic oligonucleotide
  misc_feature 1..20: note = Target: ANGPTL3; (+) strand; PAM type: NRG; PAM sequence: TAG
  source 1..20: mol_type = other DNA
ttaaaaacaggtagtcacca

SEQ ID NO: 9072 - DNA, 20 bp, synthetic construct
  misc_feature 1..20: note = Description of Artificial Sequence: Synthetic oligonucleotide
  misc_feature 1..20: note = Target: ANGPTL3; (+) strand; PAM type: NRG; PAM sequence: TAG
  source 1..20: mol_type = other DNA
tcaccatagcattgaatgtg

SEQ ID NO: 9073 - DNA, 20 bp, synthetic construct
  misc_feature 1..20: note = Description of Artificial Sequence: Synthetic oligonucleotide
  misc_feature 1..20: note = Target: ANGPTL3; (+) strand; PAM type: NRG; PAM sequence: CAG
  source 1..20: mol_type = other DNA
tgaatgtgtagtttataata

SEQ ID NO: 9074 - DNA, 20 bp, synthetic construct
  misc_feature 1..20: note = Description of Artificial Sequence: Synthetic oligonucleotide
  misc_feature 1..20: note = Target: ANGPTL3; (+) strand; PAM type: NRG; PAM sequence: AAG
  source 1..20: mol_type = other DNA
gtgtagtttataatacagca

SEQ ID NO: 9075 - DNA, 20 bp, synthetic construct
  misc_feature 1..20: note = Description of Artificial Sequence: Synthetic oligonucleotide
  misc_feature 1..20: note = Target: ANGPTL3; (+) strand; PAM type: NRG; PAM sequence: AAG
  source 1..20: mol_type = other DNA
acaatttcaaattacctatt

SEQ ID NO: 9076 - DNA, 20 bp, synthetic construct
  misc_feature 1..20: note = Description of Artificial Sequence: Synthetic oligonucleotide
  misc_feature 1..20: note = Target: ANGPTL3; (+) strand; PAM type: NRG; PAM sequence: TAG
  source 1..20: mol_type = other DNA
tttcaaattacctattaagt

SEQ ID NO: 9077 - DNA, 20 bp, synthetic construct
  misc_feature 1..20: note = Description of Artificial Sequence: Synthetic oligonucleotide
  misc_feature 1..20: note = Target: ANGPTL3; (+) strand; PAM type: NRG; PAM sequence: TAG
  source 1..20: mol_type = other DNA
ctcatttctttgatttcatt

SEQ ID NO: 9078 - DNA, 20 bp, synthetic construct
  misc_feature 1..20: note = Description of Artificial Sequence: Synthetic oligonucleotide
  misc_feature 1..20: note = Target: ANGPTL3; (+) strand; PAM type: NRG; PAM sequence: TGG
  source 1..20: mol_type = other DNA
agcattgatctaactcaatg

SEQ ID NO: 9079 - DNA, 20 bp, synthetic construct
  misc_feature 1..20: note = Description of Artificial Sequence: Synthetic oligonucleotide
  misc_feature 1..20: note = Target: ANGPTL3; (+) strand; PAM type: NRG; PAM sequence: AAG
  source 1..20: mol_type = other DNA
attgatctaactcaatgtgg

SEQ ID NO: 9080 - DNA, 20 bp, synthetic construct
  misc_feature 1..20: note = Description of Artificial Sequence: Synthetic oligonucleotide
  misc_feature 1..20: note = Target: ANGPTL3; (+) strand; PAM type: NRG; PAM sequence: AAG
  source 1..20: mol_type = other DNA
gatctaactcaatgtggaag

SEQ ID NO: 9081 - DNA, 20 bp, synthetic construct
  misc_feature 1..20: note = Description of Artificial Sequence: Synthetic oligonucleotide
  misc_feature 1..20: note = Target: ANGPTL3; (+) strand; PAM type: NRG; PAM sequence: AGG
  source 1..20: mol_type = other DNA
atctaactcaatgtggaaga

SEQ ID NO: 9082 - DNA, 20 bp, synthetic construct
  misc_feature 1..20: note = Description of Artificial Sequence: Synthetic oligonucleotide
  misc_feature 1..20: note = Target: ANGPTL3; (+) strand; PAM type: NRG; PAM sequence: AAG
  source 1..20: mol_type = other DNA
gaagaaggttacattcgtgc

SEQ ID NO: 9083 - DNA, 20 bp, synthetic construct
  misc_feature 1..20: note = Description of Artificial Sequence: Synthetic oligonucleotide
  misc_feature 1..20: note = Target: ANGPTL3; (+) strand; PAM type: NRG; PAM sequence: CGG
  source 1..20: mol_type = other DNA
tacattcgtgcaagttaaca

SEQ ID NO: 9084 - DNA, 20 bp, synthetic construct
  misc_feature 1..20: note = Description of Artificial Sequence: Synthetic oligonucleotide
  misc_feature 1..20: note = Target: ANGPTL3; (+) strand; PAM type: NRG; PAM sequence: TGG
  source 1..20: mol_type = other DNA
cctaccaaccttaccttttc

SEQ ID NO: 9085 - DNA, 20 bp, synthetic construct
  misc_feature 1..20: note = Description of Artificial Sequence: Synthetic oligonucleotide
  misc_feature 1..20: note = Target: ANGPTL3; (+) strand; PAM type: NRG; PAM sequence: GGG
  source 1..20: mol_type = other DNA
ctaccaaccttaccttttct

SEQ ID NO: 9086 - DNA, 20 bp, synthetic construct
  misc_feature 1..20: note = Description of Artificial Sequence: Synthetic oligonucleotide
  misc_feature 1..20: note = Target: ANGPTL3; (+) strand; PAM type: NRG; PAM sequence: TGG
  source 1..20: mol_type = other DNA
taccttttctgggcaaatat

SEQ ID NO: 9087 - DNA, 20 bp, synthetic construct
  misc_feature 1..20: note = Description of Artificial Sequence: Synthetic oligonucleotide
  misc_feature 1..20: note = Target: ANGPTL3; (+) strand; PAM type: NRG; PAM sequence: TAG
  source 1..20: mol_type = other DNA
tgggcaaatattggtatata

SEQ ID NO: 9088 - DNA, 20 bp, synthetic construct
  misc_feature 1..20: note = Description of Artificial Sequence: Synthetic oligonucleotide
  misc_feature 1..20: note = Target: ANGPTL3; (+) strand; PAM type: NRG; PAM sequence: GAG
  source 1..20: mol_type = other DNA
ggcaaatattggtatatata

SEQ ID NO: 9089 - DNA, 20 bp, synthetic construct
  misc_feature 1..20: note = Description of Artificial Sequence: Synthetic oligonucleotide
  misc_feature 1..20: note = Target: ANGPTL3; (+) strand; PAM type: NRG; PAM sequence: AAG
  source 1..20: mol_type = other DNA
atattggtatatatagagtt

SEQ ID NO: 9090 - DNA, 20 bp, synthetic construct
  misc_feature 1..20: note = Description of Artificial Sequence: Synthetic oligonucleotide
  misc_feature 1..20: note = Target: ANGPTL3; (+) strand; PAM type: NRG; PAM sequence: AAG
  source 1..20: mol_type = other DNA
ttggtatatatagagttaag

SEQ ID NO: 9091 - DNA, 20 bp, synthetic construct
  misc_feature 1..20: note = Description of Artificial Sequence: Synthetic oligonucleotide
  misc_feature 1..20: note = Target: ANGPTL3; (+) strand; PAM type: NRG; PAM sequence: TAG
  source 1..20: mol_type = other DNA
atatatagagttaagaagtc

SEQ ID NO: 9092 - DNA, 20 bp, synthetic construct
  misc_feature 1..20: note = Description of Artificial Sequence: Synthetic oligonucleotide
  misc_feature 1..20: note = Target: ANGPTL3; (+) strand; PAM type: NRG; PAM sequence: AGG
  source 1..20: mol_type = other DNA
tatatagagttaagaagtct

SEQ ID NO: 9093 - DNA, 20 bp, synthetic construct
  misc_feature 1..20: note = Description of Artificial Sequence: Synthetic oligonucleotide
  misc_feature 1..20: note = Target: ANGPTL3; (+) strand; PAM type: NRG; PAM sequence: CAG
  source 1..20: mol_type = other DNA
aagaagtctaggtctgcttc

SEQ ID NO: 9094 - DNA, 20 bp, synthetic construct
  misc_feature 1..20: note = Description of Artificial Sequence: Synthetic oligonucleotide
  misc_feature 1..20: note = Target: ANGPTL3; (+) strand; PAM type: NRG; PAM sequence: AAG
  source 1..20: mol_type = other DNA
aagtctaggtctgcttccag

SEQ ID NO: 9095 - DNA, 20 bp, synthetic construct
  misc_feature 1..20: note = Description of Artificial Sequence: Synthetic oligonucleotide
  misc_feature 1..20: note = Target: ANGPTL3; (+) strand; PAM type: NRG; PAM sequence: CAG
  source 1..20: mol_type = other DNA
ggtctgcttccagaagaaaa

SEQ ID NO: 9096 - DNA, 20 bp, synthetic construct
  misc_feature 1..20: note = Description of Artificial Sequence: Synthetic oligonucleotide
  misc_feature 1..20: note = Target: ANGPTL3; (+) strand; PAM type: NRG; PAM sequence: AAG
  source 1..20: mol_type = other DNA
gttgcttgaaattgaaaatc

SEQ ID NO: 9097 - DNA, 20 bp, synthetic construct
  misc_feature 1..20: note = Description of Artificial Sequence: Synthetic oligonucleotide
  misc_feature 1..20: note = Target: ANGPTL3; (+) strand; PAM type: NRG; PAM sequence: AAG
  source 1..20: mol_type = other DNA
agataaaaatgttcacaatt

SEQ ID NO: 9098 - DNA, 20 bp, synthetic construct
  misc_feature 1..20: note = Description of Artificial Sequence: Synthetic oligonucleotide
  misc_feature 1..20: note = Target: ANGPTL3; (+) strand; PAM type: NRG; PAM sequence: TAG
  source 1..20: mol_type = other DNA
ccttctttttattgttcctc

SEQ ID NO: 9099 - DNA, 20 bp, synthetic construct
  misc_feature 1..20: note = Description of Artificial Sequence: Synthetic oligonucleotide
  misc_feature 1..20: note = Target: ANGPTL3; (+) strand; PAM type: NRG; PAM sequence: CAG
  source 1..20: mol_type = other DNA
gttcctctagttatttcctc

SEQ ID NO: 9100 - DNA, 20 bp, synthetic construct
  misc_feature 1..20: note = Description of Artificial Sequence: Synthetic oligonucleotide
  misc_feature 1..20: note = Target: ANGPTL3; (+) strand; PAM type: NRG; PAM sequence: AAG
  source 1..20: mol_type = other DNA
tatttcctccagaattgatc

SEQ ID NO: 9101 - DNA, 20 bp, synthetic construct
  misc_feature 1..20: note = Description of Artificial Sequence: Synthetic oligonucleotide
  misc_feature 1..20: note = Target: ANGPTL3; (+) strand; PAM type: NRG; PAM sequence: CAG
  source 1..20: mol_type = other DNA
atcatttgattctctatctc

SEQ ID NO: 9102 - DNA, 20 bp, synthetic construct
  misc_feature 1..20: note = Description of Artificial Sequence: Synthetic oligonucleotide
  misc_feature 1..20: note = Target: ANGPTL3; (+) strand; PAM type: NRG; PAM sequence: GAG
  source 1..20: mol_type = other DNA
catttgattctctatctcca

SEQ ID NO: 9103 - DNA, 20 bp, synthetic construct
  misc_feature 1..20: note = Description of Artificial Sequence: Synthetic oligonucleotide
  misc_feature 1..20: note = Target: ANGPTL3; (+) strand; PAM type: NRG; PAM sequence: AAG
  source 1..20: mol_type = other DNA
ctatctccagagccaaaatc

SEQ ID NO: 9104 - DNA, 20 bp, synthetic construct
  misc_feature 1..20: note = Description of Artificial Sequence: Synthetic oligonucleotide
  misc_feature 1..20: note = Target: ANGPTL3; (+) strand; PAM type: NRG; PAM sequence: TAG
  source 1..20: mol_type = other DNA
aaaatcaagatttgctatgt

SEQ ID NO: 9105 - DNA, 20 bp, synthetic construct
  misc_feature 1..20: note = Description of Artificial Sequence: Synthetic oligonucleotide
  misc_feature 1..20: note = Target: ANGPTL3; (+) strand; PAM type: NRG; PAM sequence: TAG
  source 1..20: mol_type = other DNA
gttagacgatgtaaaaattt

SEQ ID NO: 9106 - DNA, 20 bp, synthetic construct
  misc_feature 1..20: note = Description of Artificial Sequence: Synthetic oligonucleotide
  misc_feature 1..20: note = Target: ANGPTL3; (+) strand; PAM type: NRG; PAM sequence: TGG
  source 1..20: mol_type = other DNA
gatgtaaaaattttagccaa

SEQ ID NO: 9107 - DNA, 20 bp, synthetic construct
  misc_feature 1..20: note = Description of Artificial Sequence: Synthetic oligonucleotide
  misc_feature 1..20: note = Target: ANGPTL3; (+) strand; PAM type: NRG; PAM sequence: CAG
  source 1..20: mol_type = other DNA
ttttagccaatggcctcctt

SEQ ID NO: 9108 - DNA, 20 bp, synthetic construct
  misc_feature 1..20: note = Description of Artificial Sequence: Synthetic oligonucleotide
  misc_feature 1..20: note = Target: ANGPTL3; (+) strand; PAM type: NRG; PAM sequence: TGG
  source 1..20: mol_type = other DNA
agccaatggcctccttcagt

SEQ ID NO: 9109 - DNA, 20 bp, synthetic construct
  misc_feature 1..20: note = Description of Artificial Sequence: Synthetic oligonucleotide
  misc_feature 1..20: note = Target: ANGPTL3; (+) strand; PAM type: NRG; PAM sequence: GGG
  source 1..20: mol_type = other DNA
gccaatggcctccttcagtt

SEQ ID NO: 9110 - DNA, 20 bp, synthetic construct
  misc_feature 1..20: note = Description of Artificial Sequence: Synthetic oligonucleotide
  misc_feature 1..20: note = Target: ANGPTL3; (+) strand; PAM type: NRG; PAM sequence: TGG
  source 1..20: mol_type = other DNA
ggcctccttcagttgggaca

SEQ ID NO: 9111 - DNA, 20 bp, synthetic construct
  misc_feature 1..20: note = Description of Artificial Sequence: Synthetic oligonucleotide
  misc_feature 1..20: note = Target: ANGPTL3; (+) strand; PAM type: NRG; PAM sequence: AAG
  source 1..20: mol_type = other DNA
tcagttgggacatggtctta

SEQ ID NO: 9112 - DNA, 20 bp, synthetic construct
  misc_feature 1..20: note = Description of Artificial Sequence: Synthetic oligonucleotide
  misc_feature 1..20: note = Target: ANGPTL3; (+) strand; PAM type: NRG; PAM sequence: AAG
  source 1..20: mol_type = other DNA
gtcttaaagactttgtccat

SEQ ID NO: 9113 - DNA, 20 bp, synthetic construct
  misc_feature 1..20: note = Description of Artificial Sequence: Synthetic oligonucleotide
  misc_feature 1..20: note = Target: ANGPTL3; (+) strand; PAM type: NRG; PAM sequence: AAG
  source 1..20: mol_type = other DNA
aagactttgtccataagacg

SEQ ID NO: 9114 - DNA, 20 bp, synthetic construct
  misc_feature 1..20: note = Description of Artificial Sequence: Synthetic oligonucleotide
  misc_feature 1..20: note = Target: ANGPTL3; (+) strand; PAM type: NRG; PAM sequence: AGG
  source 1..20: mol_type = other DNA
agactttgtccataagacga

SEQ ID NO: 9115 - DNA, 20 bp, synthetic construct
  misc_feature 1..20: note = Description of Artificial Sequence: Synthetic oligonucleotide
  misc_feature 1..20: note = Target: ANGPTL3; (+) strand; PAM type: NRG; PAM sequence: GGG
  source 1..20: mol_type = other DNA
gactttgtccataagacgaa

SEQ ID NO: 9116 - DNA, 20 bp, synthetic construct
  misc_feature 1..20: note = Description of Artificial Sequence: Synthetic oligonucleotide
  misc_feature 1..20: note = Target: ANGPTL3; (+) strand; PAM type: NRG; PAM sequence: CAG
  source 1..20: mol_type = other DNA
aaaaactcaacatatttgat

SEQ ID NO: 9117 - DNA, 20 bp, synthetic construct
  misc_feature 1..20: note = Description of Artificial Sequence: Synthetic oligonucleotide
  misc_feature 1..20: note = Target: ANGPTL3; (+) strand; PAM type: NRG; PAM sequence: CAG
  source 1..20: mol_type = other DNA
tatgatctatcgctgcaaac

SEQ ID NO: 9118 - DNA, 20 bp, synthetic construct
  misc_feature 1..20: note = Description of Artificial Sequence: Synthetic oligonucleotide
  misc_feature 1..20: note = Target: ANGPTL3; (+) strand; PAM type: NRG; PAM sequence: AAG
  source 1..20: mol_type = other DNA
gctgcaaaccagtgaaatca

SEQ ID NO: 9119 - DNA, 20 bp, synthetic construct
  misc_feature 1..20: note = Description of Artificial Sequence: Synthetic oligonucleotide
  misc_feature 1..20: note = Target: ANGPTL3; (+) strand; PAM type: NRG; PAM sequence: AAG
  source 1..20: mol_type = other DNA
gcaaaccagtgaaatcaaag

SEQ ID NO: 9120 - DNA, 20 bp, synthetic construct
  misc_feature 1..20: note = Description of Artificial Sequence: Synthetic oligonucleotide
  misc_feature 1..20: note = Target: ANGPTL3; (+) strand; PAM type: NRG; PAM sequence: AAG
  source 1..20: mol_type = other DNA
aaccagtgaaatcaaagaag

SEQ ID NO: 9121 - DNA, 20 bp, synthetic construct
  misc_feature 1..20: note = Description of Artificial Sequence: Synthetic oligonucleotide
  misc_feature 1..20: note = Target: ANGPTL3; (+) strand; PAM type: NRG; PAM sequence: AAG
  source 1..20: mol_type = other DNA
gtgaaatcaaagaagaagaa

SEQ ID NO: 9122 - DNA, 20 bp, synthetic construct
  misc_feature 1..20: note = Description of Artificial Sequence: Synthetic oligonucleotide
  misc_feature 1..20: note = Target: ANGPTL3; (+) strand; PAM type: NRG; PAM sequence: AGG
  source 1..20: mol_type = other DNA
tgaaatcaaagaagaagaaa

SEQ ID NO: 9123 - DNA, 20 bp, synthetic construct
  misc_feature 1..20: note = Description of Artificial Sequence: Synthetic oligonucleotide
  misc_feature 1..20: note = Target: ANGPTL3; (+) strand; PAM type: NRG; PAM sequence: GAG
  source 1..20: mol_type = other DNA
aaagaagaagaaaaggaact

SEQ ID NO: 9124 - DNA, 20 bp, synthetic construct
  misc_feature 1..20: note = Description of Artificial Sequence: Synthetic oligonucleotide
  misc_feature 1..20: note = Target: ANGPTL3; (+) strand; PAM type: NRG; PAM sequence: AAG
  source 1..20: mol_type = other DNA
gaagaagaaaaggaactgag

SEQ ID NO: 9125 - DNA, 20 bp, synthetic construct
  misc_feature 1..20: note = Description of Artificial Sequence: Synthetic oligonucleotide
  misc_feature 1..20: note = Target: ANGPTL3; (+) strand; PAM type: NRG; PAM sequence: AAG
  source 1..20: mol_type = other DNA
aagaactacatataaactac

SEQ ID NO: 9126 - DNA, 20 bp, synthetic construct
  misc_feature 1..20: note = Description of Artificial Sequence: Synthetic oligonucleotide
  misc_feature 1..20: note = Target: ANGPTL3; (+) strand; PAM type: NRG; PAM sequence: AAG
  source 1..20: mol_type = other DNA
taaactacaagtcaaaaatg

SEQ ID NO: 9127 - DNA, 20 bp, synthetic construct
  misc_feature 1..20: note = Description of Artificial Sequence: Synthetic oligonucleotide
  misc_feature 1..20: note = Target: ANGPTL3; (+) strand; PAM type: NRG; PAM sequence: GAG
  source 1..20: mol_type = other DNA
aactacaagtcaaaaatgaa

SEQ ID NO: 9128 - DNA, 20 bp, synthetic construct
  misc_feature 1..20: note = Description of Artificial Sequence: Synthetic oligonucleotide
  misc_feature 1..20: note = Target: ANGPTL3; (+) strand; PAM type: NRG; PAM sequence: AGG
  source 1..20: mol_type = other DNA
actacaagtcaaaaatgaag

SEQ ID NO: 9129 - DNA, 20 bp, synthetic construct
  misc_feature 1..20: note = Description of Artificial Sequence: Synthetic oligonucleotide
  misc_feature 1..20: note = Target: ANGPTL3; (+) strand; PAM type: NRG; PAM sequence: AAG
  source 1..20: mol_type = other DNA
aagtcaaaaatgaagaggta

SEQ ID NO: 9130 - DNA, 20 bp, synthetic construct
  misc_feature 1..20: note = Description of Artificial Sequence: Synthetic oligonucleotide
  misc_feature 1..20: note = Target: ANGPTL3; (+) strand; PAM type: NRG; PAM sequence: AAG
  source 1..20: mol_type = other DNA
gaactcaactcaaaacttga

SEQ ID NO: 9131 - DNA, 20 bp, synthetic construct
  misc_feature 1..20: note = Description of Artificial Sequence: Synthetic oligonucleotide
  misc_feature 1..20: note = Target: ANGPTL3; (+) strand; PAM type: NRG; PAM sequence: TAG
  source 1..20: mol_type = other DNA
ctcaaaacttgaaagcctcc

SEQ ID NO: 9132 - DNA, 20 bp, synthetic construct
  misc_feature 1..20: note = Description of Artificial Sequence: Synthetic oligonucleotide
  misc_feature 1..20: note = Target: ANGPTL3; (+) strand; PAM type: NRG; PAM sequence: AAG
  source 1..20: mol_type = other DNA
aaaacttgaaagcctcctag

SEQ ID NO: 9133 - DNA, 20 bp, synthetic construct
  misc_feature 1..20: note = Description of Artificial Sequence: Synthetic oligonucleotide
  misc_feature 1..20: note = Target: ANGPTL3; (+) strand; PAM type: NRG; PAM sequence: AAG
  source 1..20: mol_type = other DNA
aaaaattctacttcaacaaa

SEQ ID NO: 9134 - DNA, 20 bp, synthetic construct
  misc_feature 1..20: note = Description of Artificial Sequence: Synthetic oligonucleotide
  misc_feature 1..20: note = Target: ANGPTL3; (+) strand; PAM type: NRG; PAM sequence: TAG
  source 1..20: mol_type = other DNA
tcaacaaaaagtgaaatatt

SEQ ID NO: 9135 - DNA, 20 bp, synthetic construct
  misc_feature 1..20: note = Description of Artificial Sequence: Synthetic oligonucleotide
  misc_feature 1..20: note = Target: ANGPTL3; (+) strand; PAM type: NRG; PAM sequence: AAG
  source 1..20: mol_type = other DNA
acaaaaagtgaaatatttag

SEQ ID NO: 9136 - DNA, 20 bp, synthetic construct
  misc_feature 1..20: note = Description of Artificial Sequence: Synthetic oligonucleotide
  misc_feature 1..20: note = Target: ANGPTL3; (+) strand; PAM type: NRG; PAM sequence: GAG
  source 1..20: mol_type = other DNA
aaaaagtgaaatatttagaa

SEQ ID NO: 9137 - DNA, 20 bp, synthetic construct
  misc_feature 1..20: note = Description of Artificial Sequence: Synthetic oligonucleotide
  misc_feature 1..20: note = Target: ANGPTL3; (+) strand; PAM type: NRG; PAM sequence: CAG
  source 1..20: mol_type = other DNA
tcaaaatcaacctgaaactc

SEQ ID NO: 9138 - DNA, 20 bp, synthetic construct
  misc_feature 1..20: note = Description of Artificial Sequence: Synthetic oligonucleotide
  misc_feature 1..20: note = Target: ANGPTL3; (+) strand; PAM type: NRG; PAM sequence: CAG
  source 1..20: mol_type = other DNA
acctgaaactccagaacacc

SEQ ID NO: 9139 - DNA, 20 bp, synthetic construct
  misc_feature 1..20: note = Description of Artificial Sequence: Synthetic oligonucleotide
  misc_feature 1..20: note = Target: ANGPTL3; (+) strand; PAM type: NRG; PAM sequence: AAG
  source 1..20: mol_type = other DNA
tgaaactccagaacacccag

SEQ ID NO: 9140 - DNA, 20 bp, synthetic construct
  misc_feature 1..20: note = Description of Artificial Sequence: Synthetic oligonucleotide
  misc_feature 1..20: note = Target: ANGPTL3; (+) strand; PAM type: NRG; PAM sequence: AAG
  source 1..20: mol_type = other DNA
cccagaagtaacttcactta

SEQ ID NO: 9141 - DNA, 20 bp, synthetic construct
  misc_feature 1..20: note = Description of Artificial Sequence: Synthetic oligonucleotide
  misc_feature 1..20: note = Target: ANGPTL3; (+) strand; PAM type: NRG; PAM sequence: AAG
  source 1..20: mol_type = other DNA
gaagtaacttcacttaaagt

SEQ ID NO: 9142 - DNA, 20 bp, synthetic construct
  misc_feature 1..20: note = Description of Artificial Sequence: Synthetic oligonucleotide
  misc_feature 1..20: note = Target: ANGPTL3; (+) strand; PAM type: NRG; PAM sequence: TAG
  source 1..20: mol_type = other DNA
gtaacttcacttaaagtaag

SEQ ID NO: 9143 - DNA, 20 bp, synthetic construct
  misc_feature 1..20: note = Description of Artificial Sequence: Synthetic oligonucleotide
  misc_feature 1..20: note = Target: ANGPTL3; (+) strand; PAM type: NRG; PAM sequence: AAG
  source 1..20: mol_type = other DNA
cttaaagtaagtagaaaata

SEQ ID NO: 9144 - DNA, 20 bp, synthetic construct
  misc_feature 1..20: note = Description of Artificial Sequence: Synthetic oligonucleotide
  misc_feature 1..20: note = Target: ANGPTL3; (+) strand; PAM type: NRG; PAM sequence: GAG
  source 1..20: mol_type = other DNA
taaagtaagtagaaaataaa

SEQ ID NO: 9145 - DNA, 20 bp, synthetic construct
  misc_feature 1..20: note = Description of Artificial Sequence: Synthetic oligonucleotide
  misc_feature 1..20: note = Target: ANGPTL3; (+) strand; PAM type: NRG; PAM sequence: AGG
  source 1..20: mol_type = other DNA
aaagtaagtagaaaataaag

SEQ ID NO: 9146 - DNA, 20 bp, synthetic construct
  misc_feature 1..20: note = Description of Artificial Sequence: Synthetic oligonucleotide
  misc_feature 1..20: note = Target: ANGPTL3; (+) strand; PAM type: NRG; PAM sequence: GGG
  source 1..20: mol_type = other DNA
aagtaagtagaaaataaaga

SEQ ID NO: 9147 - DNA, 20 bp, synthetic construct
  misc_feature 1..20: note = Description of Artificial Sequence: Synthetic oligonucleotide
  misc_feature 1..20: note = Target: ANGPTL3; (+) strand; PAM type: NRG; PAM sequence: TGG
  source 1..20: mol_type = other DNA
tcatgtttatgttttcaatg

SEQ ID NO: 9148 - DNA, 20 bp, synthetic construct
  misc_feature 1..20: note = Description of Artificial Sequence: Synthetic oligonucleotide
  misc_feature 1..20: note = Target: ANGPTL3; (+) strand; PAM type: NRG; PAM sequence: AAG
  source 1..20: mol_type = other DNA
cttttaaaaaaaatatttct

SEQ ID NO: 9149 - DNA, 20 bp, synthetic construct
  misc_feature 1..20: note = Description of Artificial Sequence: Synthetic oligonucleotide
  misc_feature 1..20: note = Target: ANGPTL3; (+) strand; PAM type: NRG; PAM sequence: AGG
  source 1..20: mol_type = other DNA
ttttaaaaaaaatatttcta

SEQ ID NO: 9150 - DNA, 20 bp, synthetic construct
  misc_feature 1..20: note = Description of Artificial Sequence: Synthetic oligonucleotide
  misc_feature 1..20: note = Target: ANGPTL3; (+) strand; PAM type: NRG; PAM sequence: AAG
  source 1..20: mol_type = other DNA
gttgaaatacttttttttcc

SEQ ID NO: 9151 - DNA, 20 bp, synthetic construct
  misc_feature 1..20: note = Description of Artificial Sequence: Synthetic oligonucleotide
  misc_feature 1..20: note = Target: ANGPTL3; (+) strand; PAM type: NRG; PAM sequence: CAG
  source 1..20: mol_type = other DNA
tttccaagaaaaataatctc

SEQ ID NO: 9152 - DNA, 20 bp, synthetic construct
  misc_feature 1..20: note = Description of Artificial Sequence: Synthetic oligonucleotide
  misc_feature 1..20: note = Target: ANGPTL3; (+) strand; PAM type: NRG; PAM sequence: AAG
  source 1..20: mol_type = other DNA
aaatttcctattataatttc

SEQ ID NO: 9153 - DNA, 20 bp, synthetic construct
  misc_feature 1..20: note = Description of Artificial Sequence: Synthetic oligonucleotide
  misc_feature 1..20: note = Target: ANGPTL3; (+) strand; PAM type: NRG; PAM sequence: TAG
  source 1..20: mol_type = other DNA
ttcctattataatttcaagt

SEQ ID NO: 9154 - DNA, 20 bp, synthetic construct
  misc_feature 1..20: note = Description of Artificial Sequence: Synthetic oligonucleotide
  misc_feature 1..20: note = Target: ANGPTL3; (+) strand; PAM type: NRG; PAM sequence: CGG
  source 1..20: mol_type = other DNA
tttatatgaaaattacaaat

SEQ ID NO: 9155 - DNA, 20 bp, synthetic construct
  misc_feature 1..20: note = Description of Artificial Sequence: Synthetic oligonucleotide
  misc_feature 1..20: note = Target: ANGPTL3; (+) strand; PAM type: NRG; PAM sequence: TAG
  source 1..20: mol_type = other DNA
atcggttaaattatacaatc

SEQ ID NO: 9156 - DNA, 20 bp, synthetic construct
  misc_feature 1..20: note = Description of Artificial Sequence: Synthetic oligonucleotide
  misc_feature 1..20: note = Target: ANGPTL3; (+) strand; PAM type: NRG; PAM sequence: AAG
  source 1..20: mol_type = other DNA
tacactattgtaaattactg

SEQ ID NO: 9157 - DNA, 20 bp, synthetic construct
  misc_feature 1..20: note = Description of Artificial Sequence: Synthetic oligonucleotide
  misc_feature 1..20: note = Target: ANGPTL3; (+) strand; PAM type: NRG; PAM sequence: AGG
  source 1..20: mol_type = other DNA
acactattgtaaattactga

SEQ ID NO: 9158 - DNA, 20 bp, synthetic construct
  misc_feature 1..20: note = Description of Artificial Sequence: Synthetic oligonucleotide
  misc_feature 1..20: note = Target: ANGPTL3; (+) strand; PAM type: NRG; PAM sequence: AAG
  source 1..20: mol_type = other DNA
tattgtaaattactgaaggt

SEQ ID NO: 9159 - DNA, 20 bp, synthetic construct
  misc_feature 1..20: note = Description of Artificial Sequence: Synthetic oligonucleotide
  misc_feature 1..20: note = Target: ANGPTL3; (+) strand; PAM type: NRG; PAM sequence: AAG
  source 1..20: mol_type = other DNA
aattactgaaggtaagtaaa

SEQ ID NO: 9160 - DNA, 20 bp, synthetic construct
  misc_feature 1..20: note = Description of Artificial Sequence: Synthetic oligonucleotide
  misc_feature 1..20: note = Target: ANGPTL3; (+) strand; PAM type: NRG; PAM sequence: CAG
  source 1..20: mol_type = other DNA
aaaaatttaaaactattctc

SEQ ID NO: 9161 - DNA, 20 bp, synthetic construct
  misc_feature 1..20: note = Description of Artificial Sequence: Synthetic oligonucleotide
  misc_feature 1..20: note = Target: ANGPTL3; (+) strand; PAM type: NRG; PAM sequence: CAG
  source 1..20: mol_type = other DNA
ctattctccagtgtttaaaa

SEQ ID NO: 9162 - DNA, 20 bp, synthetic construct
  misc_feature 1..20: note = Description of Artificial Sequence: Synthetic oligonucleotide
  misc_feature 1..20: note = Target: ANGPTL3; (+) strand; PAM type: NRG; PAM sequence: CAG
  source 1..20: mol_type = other DNA
ttaaaacagattaaataata

SEQ ID NO: 9163 - DNA, 20 bp, synthetic construct
  misc_feature 1..20: note = Description of Artificial Sequence: Synthetic oligonucleotide
  misc_feature 1..20: note = Target: ANGPTL3; (+) strand; PAM type: NRG; PAM sequence: TGG
  source 1..20: mol_type = other DNA
agattaaataatacagtaaa

SEQ ID NO: 9164 - DNA, 20 bp, synthetic construct
  misc_feature 1..20: note = Description of Artificial Sequence: Synthetic oligonucleotide
  misc_feature 1..20: note = Target: ANGPTL3; (+) strand; PAM type: NRG; PAM sequence: AAG
  source 1..20: mol_type = other DNA
aaataatacagtaaatggaa

SEQ ID NO: 9165 - DNA, 20 bp, synthetic construct
  misc_feature 1..20: note = Description of Artificial Sequence: Synthetic oligonucleotide
  misc_feature 1..20: note = Target: ANGPTL3; (+) strand; PAM type: NRG; PAM sequence: TGG
  source 1..20: mol_type = other DNA
ttattcatatgaaaatatgc

SEQ ID NO: 9166 - DNA, 20 bp, synthetic construct
  misc_feature 1..20: note = Description of Artificial Sequence: Synthetic oligonucleotide
  misc_feature 1..20: note = Target: ANGPTL3; (+) strand; PAM type: NRG; PAM sequence: GGG
  source 1..20: mol_type = other DNA
tattcatatgaaaatatgct

SEQ ID NO: 9167 - DNA, 20 bp, synthetic construct
  misc_feature 1..20: note = Description of Artificial Sequence: Synthetic oligonucleotide
  misc_feature 1..20: note = Target: ANGPTL3; (+) strand; PAM type: NRG; PAM sequence: AAG
  source 1..20: mol_type = other DNA
tgggctttttcttttaattg

SEQ ID NO: 9168 - DNA, 20 bp, synthetic construct
  misc_feature 1..20: note = Description of Artificial Sequence: Synthetic oligonucleotide
  misc_feature 1..20: note = Target: ANGPTL3; (+) strand; PAM type: NRG; PAM sequence: CAG
  source 1..20: mol_type = other DNA
tttttcttttaattgaagtt

SEQ ID NO: 9169 - DNA, 20 bp, synthetic construct
  misc_feature 1..20: note = Description of Artificial Sequence: Synthetic oligonucleotide
  misc_feature 1..20: note = Target: ANGPTL3; (+) strand; PAM type: NRG; PAM sequence: TAG
  source 1..20: mol_type = other DNA
aagttcagaaaatcaaattt

SEQ ID NO: 9170 - DNA, 20 bp, synthetic construct
  misc_feature 1..20: note = Description of Artificial Sequence: Synthetic oligonucleotide
  misc_feature 1..20: note = Target: ANGPTL3; (+) strand; PAM type: NRG; PAM sequence: GAG
  source 1..20: mol_type = other DNA
gttcagaaaatcaaatttta

SEQ ID NO: 9171 - DNA, 20 bp, synthetic construct
  misc_feature 1..20: note = Description of Artificial Sequence: Synthetic oligonucleotide
  misc_feature 1..20: note = Target: ANGPTL3; (+) strand; PAM type: NRG; PAM sequence: TAG
  source 1..20: mol_type = other DNA
agaaaatcaaattttagaga

SEQ ID NO: 9172 - DNA, 20 bp, synthetic construct
  misc_feature 1..20: note = Description of Artificial Sequence: Synthetic oligonucleotide
  misc_feature 1..20: note = Target: ANGPTL3; (+) strand; PAM type: NRG; PAM sequence: AAG
  source 1..20: mol_type = other DNA
tacaatttaaataaaatgtt

SEQ ID NO: 9173 - DNA, 20 bp, synthetic construct
  misc_feature 1..20: note = Description of Artificial Sequence: Synthetic oligonucleotide
  misc_feature 1..20: note = Target: ANGPTL3; (+) strand; PAM type: NRG; PAM sequence: AGG
  source 1..20: mol_type = other DNA
acaatttaaataaaatgtta

SEQ ID NO: 9174 - DNA, 20 bp, synthetic construct
  misc_feature 1..20: note = Description of Artificial Sequence: Synthetic oligonucleotide
  misc_feature 1..20: note = Target: ANGPTL3; (+) strand; PAM type: NRG; PAM sequence: AAG
  source 1..20: mol_type = other DNA
caaaaatatgtgctatttga

SEQ ID NO: 9175 - DNA, 20 bp, synthetic construct
  misc_feature 1..20: note = Description of Artificial Sequence: Synthetic oligonucleotide
  misc_feature 1..20: note = Target: ANGPTL3; (+) strand; PAM type: NRG; PAM sequence: AAG
  source 1..20: mol_type = other DNA
aaatatgtgctatttgaaag

SEQ ID NO: 9176 - DNA, 20 bp, synthetic construct
  misc_feature 1..20: note = Description of Artificial Sequence: Synthetic oligonucleotide
  misc_feature 1..20: note = Target: ANGPTL3; (+) strand; PAM type: NRG; PAM sequence: AAG
  source 1..20: mol_type = other DNA
gctatttgaaagaagcatac

SEQ ID NO: 9177 - DNA, 20 bp, synthetic construct
  misc_feature 1..20: note = Description of Artificial Sequence: Synthetic oligonucleotide
  misc_feature 1..20: note = Target: ANGPTL3; (+) strand; PAM type: NRG; PAM sequence: AGG
  source 1..20: mol_type = other DNA
ctatttgaaagaagcataca

SEQ ID NO: 9178 - DNA, 20 bp, synthetic construct
  misc_feature 1..20: note = Description of Artificial Sequence: Synthetic oligonucleotide
  misc_feature 1..20: note = Target: ANGPTL3; (+) strand; PAM type: NRG; PAM sequence: GGG
  source 1..20: mol_type = other DNA
tatttgaaagaagcatacaa

SEQ ID NO: 9179 - DNA, 20 bp, synthetic construct
  misc_feature 1..20: note = Description of Artificial Sequence: Synthetic oligonucleotide
  misc_feature 1..20: note = Target: ANGPTL3; (+) strand; PAM type: NRG; PAM sequence: GGG
  source 1..20: mol_type = other DNA
atttgaaagaagcatacaag

SEQ ID NO: 9180 - DNA, 20 bp, synthetic construct
  misc_feature 1..20: note = Description of Artificial Sequence: Synthetic oligonucleotide
  misc_feature 1..20: note = Target: ANGPTL3; (+) strand; PAM type: NRG; PAM sequence: AAG
  source 1..20: mol_type = other DNA
tgaaagaagcatacaagggg

SEQ ID NO: 9181 - DNA, 20 bp, synthetic construct
  misc_feature 1..20: note = Description of Artificial Sequence: Synthetic oligonucleotide
  misc_feature 1..20: note = Target: ANGPTL3; (+) strand; PAM type: NRG; PAM sequence: AGG
  source 1..20: mol_type = other DNA
gaaagaagcatacaagggga

SEQ ID NO: 9182 - DNA, 20 bp, synthetic construct
  misc_feature 1..20: note = Description of Artificial Sequence: Synthetic oligonucleotide
  misc_feature 1..20: note = Target: ANGPTL3; (+) strand; PAM type: NRG; PAM sequence: TAG
  source 1..20: mol_type = other DNA
tcatttttcaaatccattat

SEQ ID NO: 9183 - DNA, 20 bp, synthetic construct
  misc_feature 1..20: note = Description of Artificial Sequence: Synthetic oligonucleotide
  misc_feature 1..20: note = Target: ANGPTL3; (+) strand; PAM type: NRG; PAM sequence: TAG
  source 1..20: mol_type = other DNA
ccattattagtttaaaaatt

SEQ ID NO: 9184 - DNA, 20 bp, synthetic construct
  misc_feature 1..20: note = Description of Artificial Sequence: Synthetic oligonucleotide
  misc_feature 1..20: note = Target: ANGPTL3; (+) strand; PAM type: NRG; PAM sequence: TAG
  source 1..20: mol_type = other DNA
tttaaaaatttagattatga

SEQ ID NO: 9185 - DNA, 20 bp, synthetic construct
  misc_feature 1..20: note = Description of Artificial Sequence: Synthetic oligonucleotide
  misc_feature 1..20: note = Target: ANGPTL3; (+) strand; PAM type: NRG; PAM sequence: CAG
  source 1..20: mol_type = other DNA
tttagattatgatagtgtta

SEQ ID NO: 9186 - DNA, 20 bp, synthetic construct
  misc_feature 1..20: note = Description of Artificial Sequence: Synthetic oligonucleotide
  misc_feature 1..20: note = Target: ANGPTL3; (+) strand; PAM type: NRG; PAM sequence: AGG
  source 1..20: mol_type = other DNA
ttagattatgatagtgttac

SEQ ID NO: 9187 - DNA, 20 bp, synthetic construct
  misc_feature 1..20: note = Description of Artificial Sequence: Synthetic oligonucleotide
  misc_feature 1..20: note = Target: ANGPTL3; (+) strand; PAM type: NRG; PAM sequence: TAG
  source 1..20: mol_type = other DNA
atagtgttacaggaaattaa

SEQ ID NO: 9188 - DNA, 20 bp, synthetic construct
  misc_feature 1..20: note = Description of Artificial Sequence: Synthetic oligonucleotide
  misc_feature 1..20: note = Target: ANGPTL3; (+) strand; PAM type: NRG; PAM sequence: AAG
  source 1..20: mol_type = other DNA
gttacaggaaattaatagaa

SEQ ID NO: 9189 - DNA, 20 bp, synthetic construct
  misc_feature 1..20: note = Description of Artificial Sequence: Synthetic oligonucleotide
  misc_feature 1..20: note = Target: ANGPTL3; (+) strand; PAM type: NRG; PAM sequence: AAG
  source 1..20: mol_type = other DNA
caggaaattaatagaaaaga

SEQ ID NO: 9190 - DNA, 20 bp, synthetic construct
  misc_feature 1..20: note = Description of Artificial Sequence: Synthetic oligonucleotide
  misc_feature 1..20: note = Target: ANGPTL3; (+) strand; PAM type: NRG; PAM sequence: GAG
  source 1..20: mol_type = other DNA
ggaaattaatagaaaagaaa

SEQ ID NO: 9191 - DNA, 20 bp, synthetic construct
  misc_feature 1..20: note = Description of Artificial Sequence: Synthetic oligonucleotide
  misc_feature 1..20: note = Target: ANGPTL3; (+) strand; PAM type: NRG; PAM sequence: AGG
  source 1..20: mol_type = other DNA
gaaattaatagaaaagaaag

SEQ ID NO: 9192 - DNA, 20 bp, synthetic construct
  misc_feature 1..20: note = Description of Artificial Sequence: Synthetic oligonucleotide
  misc_feature 1..20: note = Target: ANGPTL3; (+) strand; PAM type: NRG; PAM sequence: AAG
  source 1..20: mol_type = other DNA
ttaatagaaaagaaagagga

SEQ ID NO: 9193 - DNA, 20 bp, synthetic construct
  misc_feature 1..20: note = Description of Artificial Sequence: Synthetic oligonucleotide
  misc_feature 1..20: note = Target: ANGPTL3; (+) strand; PAM type: NRG; PAM sequence: CAG
  source 1..20: mol_type = other DNA
accaacctactctctatatc

SEQ ID NO: 9194 - DNA, 20 bp, synthetic construct
  misc_feature 1..20: note = Description of Artificial Sequence: Synthetic oligonucleotide
  misc_feature 1..20: note = Target: ANGPTL3; (+) strand; PAM type: NRG; PAM sequence: TAG
  source 1..20: mol_type = other DNA
tctctatatccagacttttg

SEQ ID NO: 9195 - DNA, 20 bp, synthetic construct
  misc_feature 1..20: note = Description of Artificial Sequence: Synthetic oligonucleotide
  misc_feature 1..20: note = Target: ANGPTL3; (+) strand; PAM type: NRG; PAM sequence: AAG
  source 1..20: mol_type = other DNA
ccagacttttgtagaaaaac

SEQ ID NO: 9196 - DNA, 20 bp, synthetic construct
  misc_feature 1..20: note = Description of Artificial Sequence: Synthetic oligonucleotide
  misc_feature 1..20: note = Target: ANGPTL3; (+) strand; PAM type: NRG; PAM sequence: TAG
  source 1..20: mol_type = other DNA
tttgtagaaaaacaagataa

SEQ ID NO: 9197 - DNA, 20 bp, synthetic construct
  misc_feature 1..20: note = Description of Artificial Sequence: Synthetic oligonucleotide
  misc_feature 1..20: note = Target: ANGPTL3; (+) strand; PAM type: NRG; PAM sequence: AAG
  source 1..20: mol_type = other DNA
aaaacaagataatagcatca

SEQ ID NO: 9198 - DNA, 20 bp, synthetic construct
  misc_feature 1..20: note = Description of Artificial Sequence: Synthetic oligonucleotide
  misc_feature 1..20: note = Target: ANGPTL3; (+) strand; PAM type: NRG; PAM sequence: CAG
  source 1..20: mol_type = other DNA
atagcatcaaagaccttctc

SEQ ID NO: 9199 - DNA, 20 bp, synthetic construct
  misc_feature 1..20: note = Description of Artificial Sequence: Synthetic oligonucleotide
  misc_feature 1..20: note = Target: ANGPTL3; (+) strand; PAM type: NRG; PAM sequence: TGG
  source 1..20: mol_type = other DNA
caaagaccttctccagaccg

SEQ ID NO: 9200 - DNA, 20 bp, synthetic construct
  misc_feature 1..20: note = Description of Artificial Sequence: Synthetic oligonucleotide
  misc_feature 1..20: note = Target: ANGPTL3; (+) strand; PAM type: NRG; PAM sequence: AAG
  source 1..20: mol_type = other DNA
agaccttctccagaccgtgg

SEQ ID NO: 9201 - DNA, 20 bp, synthetic construct
  misc_feature 1..20: note = Description of Artificial Sequence: Synthetic oligonucleotide
  misc_feature 1..20: note = Target: ANGPTL3; (+) strand; PAM type: NRG; PAM sequence: CAG
  source 1..20: mol_type = other DNA
aatataaacaattaaaccaa

SEQ ID NO: 9202 - DNA, 20 bp, synthetic construct
  misc_feature 1..20: note = Description of Artificial Sequence: Synthetic oligonucleotide
  misc_feature 1..20: note = Target: ANGPTL3; (+) strand; PAM type: NRG; PAM sequence: TAG
  source 1..20: mol_type = other DNA
aaacaattaaaccaacagca

SEQ ID NO: 9203 - DNA, 20 bp, synthetic construct
  misc_feature 1..20: note = Description of Artificial Sequence: Synthetic oligonucleotide
  misc_feature 1..20: note = Target: ANGPTL3; (+) strand; PAM type: NRG; PAM sequence: AAG
  source 1..20: mol_type = other DNA
ccaacagcatagtcaaataa

SEQ ID NO: 9204 - DNA, 20 bp, synthetic construct
  misc_feature 1..20: note = Description of Artificial Sequence: Synthetic oligonucleotide
  misc_feature 1..20: note = Target: ANGPTL3; (+) strand; PAM type: NRG; PAM sequence: TAG
  source 1..20: mol_type = other DNA
gcatagtcaaataaaagaaa

SEQ ID NO: 9205 - DNA, 20 bp, synthetic construct
  misc_feature 1..20: note = Description of Artificial Sequence: Synthetic oligonucleotide
  misc_feature 1..20: note = Target: ANGPTL3; (+) strand; PAM type: NRG; PAM sequence: CAG
  source 1..20: mol_type = other DNA
aaataaaagaaatagaaaat

SEQ ID NO: 9206 - DNA, 20 bp, synthetic construct
  misc_feature 1..20: note = Description of Artificial Sequence: Synthetic oligonucleotide
  misc_feature 1..20: note = Target: ANGPTL3; (+) strand; PAM type: NRG; PAM sequence: AGG
  source 1..20: mol_type = other DNA
aataaaagaaatagaaaatc

SEQ ID NO: 9207 - DNA, 20 bp, synthetic construct
  misc_feature 1..20: note = Description of Artificial Sequence: Synthetic oligonucleotide
  misc_feature 1..20: note = Target: ANGPTL3; (+) strand; PAM type: NRG; PAM sequence: AAG
  source 1..20: mol_type = other DNA
aaagaaatagaaaatcaggt

SEQ ID NO: 9208 - DNA, 20 bp, synthetic construct
  misc_feature 1..20: note = Description of Artificial Sequence: Synthetic oligonucleotide
  misc_feature 1..20: note = Target: ANGPTL3; (+) strand; PAM type: NRG; PAM sequence: CAG
  source 1..20: mol_type = other DNA
aaatagaaaatcaggtaagt

SEQ ID NO: 9209 - DNA, 20 bp, synthetic construct
  misc_feature 1..20: note = Description of Artificial Sequence: Synthetic oligonucleotide
  misc_feature 1..20: note = Target: ANGPTL3; (+) strand; PAM type: NRG; PAM sequence: TGG
  source 1..20: mol_type = other DNA
caggtaagtcagtattttaa

SEQ ID NO: 9210 - DNA, 20 bp, synthetic construct
  misc_feature 1..20: note = Description of Artificial Sequence: Synthetic oligonucleotide
  misc_feature 1..20: note = Target: ANGPTL3; (+) strand; PAM type: NRG; PAM sequence: CAG
  source 1..20: mol_type = other DNA
ggtatgtcccatctttcaca

SEQ ID NO: 9211 - DNA, 20 bp, synthetic construct
  misc_feature 1..20: note = Description of Artificial Sequence: Synthetic oligonucleotide
  misc_feature 1..20: note = Target: ANGPTL3; (+) strand; PAM type: NRG; PAM sequence: AGG
  source 1..20: mol_type = other DNA
gtatgtcccatctttcacac

SEQ ID NO: 9212 - DNA, 20 bp, synthetic construct
  misc_feature 1..20: note = Description of Artificial Sequence: Synthetic oligonucleotide
  misc_feature 1..20: note = Target: ANGPTL3; (+) strand; PAM type: NRG; PAM sequence: AAG
  source 1..20: mol_type = other DNA
tgaatcctaaaattatttac

SEQ ID NO: 9213 - DNA, 20 bp, synthetic construct
  misc_feature 1..20: note = Description of Artificial Sequence: Synthetic oligonucleotide
  misc_feature 1..20: note = Target: ANGPTL3; (+) strand; PAM type: NRG; PAM sequence: TGG
  source 1..20: mol_type = other DNA
aattatttacaagctttaac

SEQ ID NO: 9214 - DNA, 20 bp, synthetic construct
  misc_feature 1..20: note = Description of Artificial Sequence: Synthetic oligonucleotide
  misc_feature 1..20: note = Target: ANGPTL3; (+) strand; PAM type: NRG; PAM sequence: GAG
  source 1..20: mol_type = other DNA
acaagctttaactggatcat

SEQ ID NO: 9215 - DNA, 20 bp, synthetic construct
  misc_feature 1..20: note = Description of Artificial Sequence: Synthetic oligonucleotide
  misc_feature 1..20: note = Target: ANGPTL3; (+) strand; PAM type: NRG; PAM sequence: CAG
  source 1..20: mol_type = other DNA
catgagtaaaattatcacat

SEQ ID NO: 9216 - DNA, 20 bp, synthetic construct
  misc_feature 1..20: note = Description of Artificial Sequence: Synthetic oligonucleotide
  misc_feature 1..20: note = Target: ANGPTL3; (+) strand; PAM type: NRG; PAM sequence: CAG
  source 1..20: mol_type = other DNA
cagcataactgttaaaattg

SEQ ID NO: 9217 - DNA, 20 bp, synthetic construct
  misc_feature 1..20: note = Description of Artificial Sequence: Synthetic oligonucleotide
  misc_feature 1..20: note = Target: ANGPTL3; (+) strand; PAM type: NRG; PAM sequence: AGG
  source 1..20: mol_type = other DNA
agcataactgttaaaattgc

SEQ ID NO: 9218 - DNA, 20 bp, synthetic construct
  misc_feature 1..20: note = Description of Artificial Sequence: Synthetic oligonucleotide
  misc_feature 1..20: note = Target: ANGPTL3; (+) strand; PAM type: NRG; PAM sequence: AAG
  source 1..20: mol_type = other DNA
tgttaaaattgcaggctctg

SEQ ID NO: 9219 - DNA, 20 bp, synthetic construct
  misc_feature 1..20: note = Description of Artificial Sequence: Synthetic oligonucleotide
  misc_feature 1..20: note = Target: ANGPTL3; (+) strand; PAM type: NRG; PAM sequence: TGG
  source 1..20: mol_type = other DNA
aactacctgcatttaaacca

SEQ ID NO: 9220 - DNA, 20 bp, synthetic construct
  misc_feature 1..20: note = Description of Artificial Sequence: Synthetic oligonucleotide
  misc_feature 1..20: note = Target: ANGPTL3; (+) strand; PAM type: NRG; PAM sequence: CAG
  source 1..20: mol_type = other DNA
tacttcacccctttatctct

SEQ ID NO: 9221 - DNA, 20 bp, synthetic construct
  misc_feature 1..20: note = Description of Artificial Sequence: Synthetic oligonucleotide
  misc_feature 1..20: note = Target: ANGPTL3; (+) strand; PAM type: NRG; PAM sequence: AAG
  source 1..20: mol_type = other DNA
gtttcctcacatatactaca

SEQ ID NO: 9222 - DNA, 20 bp, synthetic construct
  misc_feature 1..20: note = Description of Artificial Sequence: Synthetic oligonucleotide
  misc_feature 1..20: note = Target: ANGPTL3; (+) strand; PAM type: NRG; PAM sequence: CAG
  source 1..20: mol_type = other DNA
atatactacaaagataataa

SEQ ID NO: 9223 - DNA, 20 bp, synthetic construct
  misc_feature 1..20: note = Description of Artificial Sequence: Synthetic oligonucleotide
  misc_feature 1..20: note = Target: ANGPTL3; (+) strand; PAM type: NRG; PAM sequence: TAG
  source 1..20: mol_type = other DNA
aaagataataacagaactta

SEQ ID NO: 9224 - DNA, 20 bp, synthetic construct
  misc_feature 1..20: note = Description of Artificial Sequence: Synthetic oligonucleotide
  misc_feature 1..20: note = Target: ANGPTL3; (+) strand; PAM type: NRG; PAM sequence: AGG
  source 1..20: mol_type = other DNA
aagataataacagaacttat

SEQ ID NO: 9225 - DNA, 20 bp, synthetic construct
  misc_feature 1..20: note = Description of Artificial Sequence: Synthetic oligonucleotide
  misc_feature 1..20: note = Target: ANGPTL3; (+) strand; PAM type: NRG; PAM sequence: AAG
  source 1..20: mol_type = other DNA
agaacttataggattattgt

SEQ ID NO: 9226 - DNA, 20 bp, synthetic construct
  misc_feature 1..20: note = Description of Artificial Sequence: Synthetic oligonucleotide
  misc_feature 1..20: note = Target: ANGPTL3; (+) strand; PAM type: NRG; PAM sequence: TAG
  source 1..20: mol_type = other DNA
taagaaaaaaaattaattca

SEQ ID NO: 9227 - DNA, 20 bp, synthetic construct
  misc_feature 1..20: note = Description of Artificial Sequence: Synthetic oligonucleotide
  misc_feature 1..20: note = Target: ANGPTL3; (+) strand; PAM type: NRG; PAM sequence: CAG
  source 1..20: mol_type = other DNA
gaaaaaaaattaattcatag

SEQ ID NO: 9228 - DNA, 20 bp, synthetic construct
  misc_feature 1..20: note = Description of Artificial Sequence: Synthetic oligonucleotide
  misc_feature 1..20: note = Target: ANGPTL3; (+) strand; PAM type: NRG; PAM sequence: TAG
  source 1..20: mol_type = other DNA
catcttactaaaattcaaat

SEQ ID NO: 9229 - DNA, 20 bp, synthetic construct
  misc_feature 1..20: note = Description of Artificial Sequence: Synthetic oligonucleotide
  misc_feature 1..20: note = Target: ANGPTL3; (+) strand; PAM type: NRG; PAM sequence: TAG
  source 1..20: mol_type = other DNA
ctttgctcaaaaccacacaa

SEQ ID NO: 9230 - DNA, 20 bp, synthetic construct
  misc_feature 1..20: note = Description of Artificial Sequence: Synthetic oligonucleotide
  misc_feature 1..20: note = Target: ANGPTL3; (+) strand; PAM type: NRG; PAM sequence: TGG
  source 1..20: mol_type = other DNA
gctttccatttcactcatat

SEQ ID NO: 9231 - DNA, 20 bp, synthetic construct
  misc_feature 1..20: note = Description of Artificial Sequence: Synthetic oligonucleotide
  misc_feature 1..20: note = Target: ANGPTL3; (+) strand; PAM type: NRG; PAM sequence: TAG
  source 1..20: mol_type = other DNA
tttcactcatattggctctt

SEQ ID NO: 9232 - DNA, 20 bp, synthetic construct
  misc_feature 1..20: note = Description of Artificial Sequence: Synthetic oligonucleotide
  misc_feature 1..20: note = Target: ANGPTL3; (+) strand; PAM type: NRG; PAM sequence: AAG
  source 1..20: mol_type = other DNA
tcatattggctctttagacc

SEQ ID NO: 9233 - DNA, 20 bp, synthetic construct
  misc_feature 1..20: note = Description of Artificial Sequence: Synthetic oligonucleotide
  misc_feature 1..20: note = Target: ANGPTL3; (+) strand; PAM type: NRG; PAM sequence: TAG
  source 1..20: mol_type = other DNA
tgacttcacctcctctactc

SEQ ID NO: 9234 - DNA, 20 bp, synthetic construct
  misc_feature 1..20: note = Description of Artificial Sequence: Synthetic oligonucleotide
  misc_feature 1..20: note = Target: ANGPTL3; (+) strand; PAM type: NRG; PAM sequence: CAG
  source 1..20: mol_type = other DNA
agttattctgaccgctttac

SEQ ID NO: 9235 - DNA, 20 bp, synthetic construct
  misc_feature 1..20: note = Description of Artificial Sequence: Synthetic oligonucleotide
  misc_feature 1..20: note = Target: ANGPTL3; (+) strand; PAM type: NRG; PAM sequence: AAG
  source 1..20: mol_type = other DNA
tcaaacatactgccacctca

SEQ ID NO: 9236 - DNA, 20 bp, synthetic construct
  misc_feature 1..20: note = Description of Artificial Sequence: Synthetic oligonucleotide
  misc_feature 1..20: note = Target: ANGPTL3; (+) strand; PAM type: NRG; PAM sequence: TGG
  source 1..20: mol_type = other DNA
cccttgttgtttcctctaac

SEQ ID NO: 9237 - DNA, 20 bp, synthetic construct
  misc_feature 1..20: note = Description of Artificial Sequence: Synthetic oligonucleotide
  misc_feature 1..20: note = Target: ANGPTL3; (+) strand; PAM type: NRG; PAM sequence: TGG
  source 1..20: mol_type = other DNA
actggaacgctcttctgccc

SEQ ID NO: 9238 - DNA, 20 bp, synthetic construct
  misc_feature 1..20: note = Description of Artificial Sequence: Synthetic oligonucleotide
  misc_feature 1..20: note = Target: ANGPTL3; (+) strand; PAM type: NRG; PAM sequence: TGG
  source 1..20: mol_type = other DNA
cttctgccctggtatctacg

SEQ ID NO: 9239 - DNA, 20 bp, synthetic construct
  misc_feature 1..20: note = Description of Artificial Sequence: Synthetic oligonucleotide
  misc_feature 1..20: note = Target: ANGPTL3; (+) strand; PAM type: NRG; PAM sequence: TAG
  source 1..20: mol_type = other DNA
gcccactctctgatttccct

SEQ ID NO: 9240 - DNA, 20 bp, synthetic construct
  misc_feature 1..20: note = Description of Artificial Sequence: Synthetic oligonucleotide
  misc_feature 1..20: note = Target: ANGPTL3; (+) strand; PAM type: NRG; PAM sequence: AGG
  source 1..20: mol_type = other DNA
cccactctctgatttccctt

SEQ ID NO: 9241 - DNA, 20 bp, synthetic construct
  misc_feature 1..20: note = Description of Artificial Sequence: Synthetic oligonucleotide
  misc_feature 1..20: note = Target: ANGPTL3; (+) strand; PAM type: NRG; PAM sequence: GGG
  source 1..20: mol_type = other DNA
ccactctctgatttccctta

SEQ ID NO: 9242 - DNA, 20 bp, synthetic construct
  misc_feature 1..20: note = Description of Artificial Sequence: Synthetic oligonucleotide
  misc_feature 1..20: note = Target: ANGPTL3; (+) strand; PAM type: NRG; PAM sequence: AAG
  source 1..20: mol_type = other DNA
caaacaaaaaattcccaatg

SEQ ID NO: 9243 - DNA, 20 bp, synthetic construct
  misc_feature 1..20: note = Description of Artificial Sequence: Synthetic oligonucleotide
  misc_feature 1..20: note = Target: ANGPTL3; (+) strand; PAM type: NRG; PAM sequence: AAG
  source 1..20: mol_type = other DNA
aattcccaatgaagacttac

SEQ ID NO: 9244 - DNA, 20 bp, synthetic construct
  misc_feature 1..20: note = Description of Artificial Sequence: Synthetic oligonucleotide
  misc_feature 1..20: note = Target: ANGPTL3; (+) strand; PAM type: NRG; PAM sequence: AGG
  source 1..20: mol_type = other DNA
attcccaatgaagacttaca

SEQ ID NO: 9245 - DNA, 20 bp, synthetic construct
  misc_feature 1..20: note = Description of Artificial Sequence: Synthetic oligonucleotide
  misc_feature 1..20: note = Target: ANGPTL3; (+) strand; PAM type: NRG; PAM sequence: TGG
  source 1..20: mol_type = other DNA
aaccaaaaatcacaaccgcc

SEQ ID NO: 9246 - DNA, 20 bp, synthetic construct
  misc_feature 1..20: note = Description of Artificial Sequence: Synthetic oligonucleotide
  misc_feature 1..20: note = Target: ANGPTL3; (+) strand; PAM type: NRG; PAM sequence: TAG
  source 1..20: mol_type = other DNA
cctgaaaacttctacttcct

SEQ ID NO: 9247 - DNA, 20 bp, synthetic construct
  misc_feature 1..20: note = Description of Artificial Sequence: Synthetic oligonucleotide
  misc_feature 1..20: note = Target: ANGPTL3; (+) strand; PAM type: NRG; PAM sequence: TAG
  source 1..20: mol_type = other DNA
atttaacataacataaattt

SEQ ID NO: 9248 - DNA, 20 bp, synthetic construct
  misc_feature 1..20: note = Description of Artificial Sequence: Synthetic oligonucleotide
  misc_feature 1..20: note = Target: ANGPTL3; (+) strand; PAM type: NRG; PAM sequence: AAG
  source 1..20: mol_type = other DNA
ctattcctgcactaaaatgt

SEQ ID NO: 9249 - DNA, 20 bp, synthetic construct
  misc_feature 1..20: note = Description of Artificial Sequence: Synthetic oligonucleotide
  misc_feature 1..20: note = Target: ANGPTL3; (+) strand; PAM type: NRG; PAM sequence: CAG
  source 1..20: mol_type = other DNA
aaatgtaagctctgtgaata

SEQ ID NO: 9250 - DNA, 20 bp, synthetic construct
  misc_feature 1..20: note = Description of Artificial Sequence: Synthetic oligonucleotide
  misc_feature 1..20: note = Target: ANGPTL3; (+) strand; PAM type: NRG; PAM sequence: AGG
  source 1..20: mol_type = other DNA
aatgtaagctctgtgaatac

SEQ ID NO: 9251 - DNA, 20 bp, synthetic construct
  misc_feature 1..20: note = Description of Artificial Sequence: Synthetic oligonucleotide
  misc_feature 1..20: note = Target: ANGPTL3; (+) strand; PAM type: NRG; PAM sequence: GGG
  source 1..20: mol_type = other DNA
atgtaagctctgtgaataca

SEQ ID NO: 9252 - DNA, 20 bp, synthetic construct
  misc_feature 1..20: note = Description of Artificial Sequence: Synthetic oligonucleotide
  misc_feature 1..20: note = Target: ANGPTL3; (+) strand; PAM type: NRG; PAM sequence: CAG
  source 1..20: mol_type = other DNA
tccattatttgtatatactc

SEQ ID NO: 9253 - DNA, 20 bp, synthetic construct
  misc_feature 1..20: note = Description of Artificial Sequence: Synthetic oligonucleotide
  misc_feature 1..20: note = Target: ANGPTL3; (+) strand; PAM type: NRG; PAM sequence: TAG
  source 1..20: mol_type = other DNA
tttgtatatactccagaata

SEQ ID NO: 9254 - DNA, 20 bp, synthetic construct
  misc_feature 1..20: note = Description of Artificial Sequence: Synthetic oligonucleotide
  misc_feature 1..20: note = Target: ANGPTL3; (+) strand; PAM type: NRG; PAM sequence: TGG
  source 1..20: mol_type = other DNA
ccagaatatagaatactgta

SEQ ID NO: 9255 - DNA, 20 bp, synthetic construct
  misc_feature 1..20: note = Description of Artificial Sequence: Synthetic oligonucleotide
  misc_feature 1..20: note = Target: ANGPTL3; (+) strand; PAM type: NRG; PAM sequence: CAG
  source 1..20: mol_type = other DNA
atagaatactgtatggcaca

SEQ ID NO: 9256 - DNA, 20 bp, synthetic construct
  misc_feature 1..20: note = Description of Artificial Sequence: Synthetic oligonucleotide
  misc_feature 1..20: note = Target: ANGPTL3; (+) strand; PAM type: NRG; PAM sequence: TAG
  source 1..20: mol_type = other DNA
gaatactgtatggcacacag

SEQ ID NO: 9257 - DNA, 20 bp, synthetic construct
  misc_feature 1..20: note = Description of Artificial Sequence: Synthetic oligonucleotide
  misc_feature 1..20: note = Target: ANGPTL3; (+) strand; PAM type: NRG; PAM sequence: AGG
  source 1..20: mol_type = other DNA
aatactgtatggcacacagt

SEQ ID NO: 9258 - DNA, 20 bp, synthetic construct
  misc_feature 1..20: note = Description of Artificial Sequence: Synthetic oligonucleotide
  misc_feature 1..20: note = Target: ANGPTL3; (+) strand; PAM type: NRG; PAM sequence: CAG
  source 1..20: mol_type = other DNA
aatgtaatgtcatattcaca

SEQ ID NO: 9259 - DNA, 20 bp, synthetic construct
  misc_feature 1..20: note = Description of Artificial Sequence: Synthetic oligonucleotide
  misc_feature 1..20: note = Target: ANGPTL3; (+) strand; PAM type: NRG; PAM sequence: AAG
  source 1..20: mol_type = other DNA
gtaatgtcatattcacacag

SEQ ID NO: 9260 - DNA, 20 bp, synthetic construct
  misc_feature 1..20: note = Description of Artificial Sequence: Synthetic oligonucleotide
  misc_feature 1..20: note = Target: ANGPTL3; (+) strand; PAM type: NRG; PAM sequence: TGG
  source 1..20: mol_type = other DNA
gtgctatgattattattact

SEQ ID NO: 9261 - DNA, 20 bp, synthetic construct
  misc_feature 1..20: note = Description of Artificial Sequence: Synthetic oligonucleotide
  misc_feature 1..20: note = Target: ANGPTL3; (+) strand; PAM type: NRG; PAM sequence: TAG
  source 1..20: mol_type = other DNA
attattattacttggattac

SEQ ID NO: 9262 - DNA, 20 bp, synthetic construct
  misc_feature 1..20: note = Description of Artificial Sequence: Synthetic oligonucleotide
  misc_feature 1..20: note = Target: ANGPTL3; (+) strand; PAM type: NRG; PAM sequence: TAG
  source 1..20: mol_type = other DNA
attacttggattactagaaa

SEQ ID NO: 9263 - DNA, 20 bp, synthetic construct
  misc_feature 1..20: note = Description of Artificial Sequence: Synthetic oligonucleotide
  misc_feature 1..20: note = Target: ANGPTL3; (+) strand; PAM type: NRG; PAM sequence: AAG
  source 1..20: mol_type = other DNA
aatagtgtgcctcataatta

SEQ ID NO: 9264 - DNA, 20 bp, synthetic construct
  misc_feature 1..20: note = Description of Artificial Sequence: Synthetic oligonucleotide
  misc_feature 1..20: note = Target: ANGPTL3; (+) strand; PAM type: NRG; PAM sequence: AGG
  source 1..20: mol_type = other DNA
atagtgtgcctcataattaa

SEQ ID NO: 9265 - DNA, 20 bp, synthetic construct
  misc_feature 1..20: note = Description of Artificial Sequence: Synthetic oligonucleotide
  misc_feature 1..20: note = Target: ANGPTL3; (+) strand; PAM type: NRG; PAM sequence: TGG
  source 1..20: mol_type = other DNA
taatctacaatgtaaacatc

SEQ ID NO: 9266 - DNA, 20 bp, synthetic construct
  misc_feature 1..20: note = Description of Artificial Sequence: Synthetic oligonucleotide
  misc_feature 1..20: note = Target: ANGPTL3; (+) strand; PAM type: NRG; PAM sequence: AAG
  source 1..20: mol_type = other DNA
tacaatgtaaacatctggtg

SEQ ID NO: 9267 - DNA, 20 bp, synthetic construct
  misc_feature 1..20: note = Description of Artificial Sequence: Synthetic oligonucleotide
  misc_feature 1..20: note = Target: ANGPTL3; (+) strand; PAM type: NRG; PAM sequence: CAG
  source 1..20: mol_type = other DNA
gtaaacatctggtgaagtga

SEQ ID NO: 9268 - DNA, 20 bp, synthetic construct
  misc_feature 1..20: note = Description of Artificial Sequence: Synthetic oligonucleotide
  misc_feature 1..20: note = Target: ANGPTL3; (+) strand; PAM type: NRG; PAM sequence: GAG
  source 1..20: mol_type = other DNA
aaacatctggtgaagtgaca

SEQ ID NO: 9269 - DNA, 20 bp, synthetic construct
  misc_feature 1..20: note = Description of Artificial Sequence: Synthetic oligonucleotide
  misc_feature 1..20: note = Target: ANGPTL3; (+) strand; PAM type: NRG; PAM sequence: AGG
  source 1..20: mol_type = other DNA
aacatctggtgaagtgacag

SEQ ID NO: 9270 - DNA, 20 bp, synthetic construct
  misc_feature 1..20: note = Description of Artificial Sequence: Synthetic oligonucleotide
  misc_feature 1..20: note = Target: ANGPTL3; (+) strand; PAM type: NRG; PAM sequence: GGG
  source 1..20: mol_type = other DNA
acatctggtgaagtgacaga

SEQ ID NO: 9271 - DNA, 20 bp, synthetic construct
  misc_feature 1..20: note = Description of Artificial Sequence: Synthetic oligonucleotide
  misc_feature 1..20: note = Target: ANGPTL3; (+) strand; PAM type: NRG; PAM sequence: AAG
  source 1..20: mol_type = other DNA
tctggtgaagtgacagaggg

SEQ ID NO: 9272 - DNA, 20 bp, synthetic construct
  misc_feature 1..20: note = Description of Artificial Sequence: Synthetic oligonucleotide
  misc_feature 1..20: note = Target: ANGPTL3; (+) strand; PAM type: NRG; PAM sequence: TAG
  source 1..20: mol_type = other DNA
gacagagggaagcacttgtt

SEQ ID NO: 9273 - DNA, 20 bp, synthetic construct
  misc_feature 1..20: note = Description of Artificial Sequence: Synthetic oligonucleotide
  misc_feature 1..20: note = Target: ANGPTL3; (+) strand; PAM type: NRG; PAM sequence: AAG
  source 1..20: mol_type = other DNA
ggaagcacttgtttagaaaa

SEQ ID NO: 9274 - DNA, 20 bp, synthetic construct
  misc_feature 1..20: note = Description of Artificial Sequence: Synthetic oligonucleotide
  misc_feature 1..20: note = Target: ANGPTL3; (+) strand; PAM type: NRG; PAM sequence: CAG
  source 1..20: mol_type = other DNA
tgtttagaaaaaagctatgt

SEQ ID NO: 9275 - DNA, 20 bp, synthetic construct
  misc_feature 1..20: note = Description of Artificial Sequence: Synthetic oligonucleotide
  misc_feature 1..20: note = Target: ANGPTL3; (+) strand; PAM type: NRG; PAM sequence: CAG
  source 1..20: mol_type = other DNA
aatccatgtattctaatatg

SEQ ID NO: 9276 - DNA, 20 bp, synthetic construct
  misc_feature 1..20: note = Description of Artificial Sequence: Synthetic oligonucleotide
  misc_feature 1..20: note = Target: ANGPTL3; (+) strand; PAM type: NRG; PAM sequence: TAG
  source 1..20: mol_type = other DNA
tattctaatatgcagtacaa

SEQ ID NO: 9277 - DNA, 20 bp, synthetic construct
  misc_feature 1..20: note = Description of Artificial Sequence: Synthetic oligonucleotide
  misc_feature 1..20: note = Target: ANGPTL3; (+) strand; PAM type: NRG; PAM sequence: CAG
  source 1..20: mol_type = other DNA
atattaataatactctcaaa

SEQ ID NO: 9278 - DNA, 20 bp, synthetic construct
  misc_feature 1..20: note = Description of Artificial Sequence: Synthetic oligonucleotide
  misc_feature 1..20: note = Target: ANGPTL3; (+) strand; PAM type: NRG; PAM sequence: AAG
  source 1..20: mol_type = other DNA
atactctcaaacagctattc

SEQ ID NO: 9279 - DNA, 20 bp, synthetic construct
  misc_feature 1..20: note = Description of Artificial Sequence: Synthetic oligonucleotide
  misc_feature 1..20: note = Target: ANGPTL3; (+) strand; PAM type: NRG; PAM sequence: GAG
  source 1..20: mol_type = other DNA
actctcaaacagctattcaa

SEQ ID NO: 9280 - DNA, 20 bp, synthetic construct
  misc_feature 1..20: note = Description of Artificial Sequence: Synthetic oligonucleotide
  misc_feature 1..20: note = Target: ANGPTL3; (+) strand; PAM type: NRG; PAM sequence: AGG
  source 1..20: mol_type = other DNA
ctctcaaacagctattcaag

SEQ ID NO: 9281 - DNA, 20 bp, synthetic construct
  misc_feature 1..20: note = Description of Artificial Sequence: Synthetic oligonucleotide
  misc_feature 1..20: note = Target: ANGPTL3; (+) strand; PAM type: NRG; PAM sequence: CAG
  source 1..20: mol_type = other DNA
caaaaaacataatataaact

SEQ ID NO: 9282 - DNA, 20 bp, synthetic construct
  misc_feature 1..20: note = Description of Artificial Sequence: Synthetic oligonucleotide
  misc_feature 1..20: note = Target: ANGPTL3; (+) strand; PAM type: NRG; PAM sequence: GAG
  source 1..20: mol_type = other DNA
aaaaacataatataaactca

SEQ ID NO: 9283 - DNA, 20 bp, synthetic construct
  misc_feature 1..20: note = Description of Artificial Sequence: Synthetic oligonucleotide
  misc_feature 1..20: note = Target: ANGPTL3; (+) strand; PAM type: NRG; PAM sequence: TGG
  source 1..20: mol_type = other DNA
taatataaactcagagaaac

SEQ ID NO: 9284 - DNA, 20 bp, synthetic construct
  misc_feature 1..20: note = Description of Artificial Sequence: Synthetic oligonucleotide
  misc_feature 1..20: note = Target: ANGPTL3; (+) strand; PAM type: NRG; PAM sequence: AAG
  source 1..20: mol_type = other DNA
tggtaaacaaaatcattttc

SEQ ID NO: 9285 - DNA, 20 bp, synthetic construct
  misc_feature 1..20: note = Description of Artificial Sequence: Synthetic oligonucleotide
  misc_feature 1..20: note = Target: ANGPTL3; (+) strand; PAM type: NRG; PAM sequence: GAG
  source 1..20: mol_type = other DNA
gtaaacaaaatcattttcaa

SEQ ID NO: 9286 - DNA, 20 bp, synthetic construct
  misc_feature 1..20: note = Description of Artificial Sequence: Synthetic oligonucleotide
  misc_feature 1..20: note = Target: ANGPTL3; (+) strand; PAM type: NRG; PAM sequence: TAG
  source 1..20: mol_type = other DNA
ccactaaacaaacataatgt

SEQ ID NO: 9287 - DNA, 20 bp, synthetic construct
  misc_feature 1..20: note = Description of Artificial Sequence: Synthetic oligonucleotide
  misc_feature 1..20: note = Target: ANGPTL3; (+) strand; PAM type: NRG; PAM sequence: TAG
  source 1..20: mol_type = other DNA
ctaaacaaacataatgttag

SEQ ID NO: 9288 - DNA, 20 bp, synthetic construct
  misc_feature 1..20: note = Description of Artificial Sequence: Synthetic oligonucleotide
  misc_feature 1..20: note = Target: ANGPTL3; (+) strand; PAM type: NRG; PAM sequence: AAG
  source 1..20: mol_type = other DNA
aatgttagtagtgctgctaa

SEQ ID NO: 9289 - DNA, 20 bp, synthetic construct
  misc_feature 1..20: note = Description of Artificial Sequence: Synthetic oligonucleotide
  misc_feature 1..20: note = Target: ANGPTL3; (+) strand; PAM type: NRG; PAM sequence: AGG
  source 1..20: mol_type = other DNA
atgttagtagtgctgctaaa

SEQ ID NO: 9290 - DNA, 20 bp, synthetic construct
  misc_feature 1..20: note = Description of Artificial Sequence: Synthetic oligonucleotide
  misc_feature 1..20: note = Target: ANGPTL3; (+) strand; PAM type: NRG; PAM sequence: TGG
  source 1..20: mol_type = other DNA
ggttttttatcaactacttt

SEQ ID NO: 9291 - DNA, 20 bp, synthetic construct
  misc_feature 1..20: note = Description of Artificial Sequence: Synthetic oligonucleotide
  misc_feature 1..20: note = Target: ANGPTL3; (+) strand; PAM type: NRG; PAM sequence: AAG
  source 1..20: mol_type = other DNA
ttaaatgaacctgctcccca

SEQ ID NO: 9292 - DNA, 20 bp, synthetic construct
  misc_feature 1..20: note = Description of Artificial Sequence: Synthetic oligonucleotide
  misc_feature 1..20: note = Target: ANGPTL3; (+) strand; PAM type: NRG; PAM sequence: TAG
  source 1..20: mol_type = other DNA
cccaaagcaaaatgttacta

SEQ ID NO: 9293 - DNA, 20 bp, synthetic construct
  misc_feature 1..20: note = Description of Artificial Sequence: Synthetic oligonucleotide
  misc_feature 1..20: note = Target: ANGPTL3; (+) strand; PAM type: NRG; PAM sequence: AAG
  source 1..20: mol_type = other DNA
tctaaaaataaaaatgtgtg

SEQ ID NO: 9294 - DNA, 20 bp, synthetic construct
  misc_feature 1..20: note = Description of Artificial Sequence: Synthetic oligonucleotide
  misc_feature 1..20: note = Target: ANGPTL3; (+) strand; PAM type: NRG; PAM sequence: GAG
  source 1..20: mol_type = other DNA
aaccaaaacaatgaatttct

SEQ ID NO: 9295 - DNA, 20 bp, synthetic construct
  misc_feature 1..20: note = Description of Artificial Sequence: Synthetic oligonucleotide
  misc_feature 1..20: note = Target: ANGPTL3; (+) strand; PAM type: NRG; PAM sequence: TGG
  source 1..20: mol_type = other DNA
aaaacaatgaatttctgagt

SEQ ID NO: 9296 - DNA, 20 bp, synthetic construct
  misc_feature 1..20: note = Description of Artificial Sequence: Synthetic oligonucleotide
  misc_feature 1..20: note = Target: ANGPTL3; (+) strand; PAM type: NRG; PAM sequence: AAG
  source 1..20: mol_type = other DNA
acaatgaatttctgagttgg

SEQ ID NO: 9297 - DNA, 20 bp, synthetic construct
  misc_feature 1..20: note = Description of Artificial Sequence: Synthetic oligonucleotide
  misc_feature 1..20: note = Target: ANGPTL3; (+) strand; PAM type: NRG; PAM sequence: AAG
  source 1..20: mol_type = other DNA
atgaatttctgagttggaag

SEQ ID NO: 9298 - DNA, 20 bp, synthetic construct
  misc_feature 1..20: note = Description of Artificial Sequence: Synthetic oligonucleotide
  misc_feature 1..20: note = Target: ANGPTL3; (+) strand; PAM type: NRG; PAM sequence: GAG
  source 1..20: mol_type = other DNA
gaatttctgagttggaagaa

SEQ ID NO: 9299 - DNA, 20 bp, synthetic construct
  misc_feature 1..20: note = Description of Artificial Sequence: Synthetic oligonucleotide
  misc_feature 1..20: note = Target: ANGPTL3; (+) strand; PAM type: NRG; PAM sequence: TAG
  source 1..20: mol_type = other DNA
ttctgagttggaagaagagt

SEQ ID NO: 9300 - DNA, 20 bp, synthetic construct
  misc_feature 1..20: note = Description of Artificial Sequence: Synthetic oligonucleotide
  misc_feature 1..20: note = Target: ANGPTL3; (+) strand; PAM type: NRG; PAM sequence: AAG
  source 1..20: mol_type = other DNA
aaacaaaactctaaaaattt

SEQ ID NO: 9301 - DNA, 20 bp, synthetic construct
  misc_feature 1..20: note = Description of Artificial Sequence: Synthetic oligonucleotide
  misc_feature 1..20: note = Target: ANGPTL3; (+) strand; PAM type: NRG; PAM sequence: AAG
  source 1..20: mol_type = other DNA
ctaaaaatttaagtaacttt

SEQ ID NO: 9302 - DNA, 20 bp, synthetic construct
  misc_feature 1..20: note = Description of Artificial Sequence: Synthetic oligonucleotide
  misc_feature 1..20: note = Target: ANGPTL3; (+) strand; PAM type: NRG; PAM sequence: TAG
  source 1..20: mol_type = other DNA
taagtaactttaagatcaca

SEQ ID NO: 9303 - DNA, 20 bp, synthetic construct
  misc_feature 1..20: note = Description of Artificial Sequence: Synthetic oligonucleotide
  misc_feature 1..20: note = Target: ANGPTL3; (+) strand; PAM type: NRG; PAM sequence: TAG
  source 1..20: mol_type = other DNA
tttaagatcacatagttact

SEQ ID NO: 9304 - DNA, 20 bp, synthetic construct
  misc_feature 1..20: note = Description of Artificial Sequence: Synthetic oligonucleotide
  misc_feature 1..20: note = Target: ANGPTL3; (+) strand; PAM type: NRG; PAM sequence: TAG
  source 1..20: mol_type = other DNA
aagatcacatagttacttag

SEQ ID NO: 9305 - DNA, 20 bp, synthetic construct
  misc_feature 1..20: note = Description of Artificial Sequence: Synthetic oligonucleotide
  misc_feature 1..20: note = Target: ANGPTL3; (+) strand; PAM type: NRG; PAM sequence: AAG
  source 1..20: mol_type = other DNA
cacatagttacttagtagaa

SEQ ID NO: 9306 - DNA, 20 bp, synthetic construct
  misc_feature 1..20: note = Description of Artificial Sequence: Synthetic oligonucleotide
  misc_feature 1..20: note = Target: ANGPTL3; (+) strand; PAM type: NRG; PAM sequence: GAG
  source 1..20: mol_type = other DNA
catagttacttagtagaaaa

SEQ ID NO: 9307 - DNA, 20 bp, synthetic construct
  misc_feature 1..20: note = Description of Artificial Sequence: Synthetic oligonucleotide
  misc_feature 1..20: note = Target: ANGPTL3; (+) strand; PAM type: NRG; PAM sequence: CAG
  source 1..20: mol_type = other DNA
tagtagaaaagagtaatacc

SEQ ID NO: 9308 - DNA, 20 bp, synthetic construct
  misc_feature 1..20: note = Description of Artificial Sequence: Synthetic oligonucleotide
  misc_feature 1..20: note = Target: ANGPTL3; (+) strand; PAM type: NRG; PAM sequence: AAG
  source 1..20: mol_type = other DNA
agaaaagagtaatacccagc

SEQ ID NO: 9309 - DNA, 20 bp, synthetic construct
  misc_feature 1..20: note = Description of Artificial Sequence: Synthetic oligonucleotide
  misc_feature 1..20: note = Target: ANGPTL3; (+) strand; PAM type: NRG; PAM sequence: TAG
  source 1..20: mol_type = other DNA
ccagcaagcaaactttacaa

SEQ ID NO: 9310 - DNA, 20 bp, synthetic construct
  misc_feature 1..20: note = Description of Artificial Sequence: Synthetic oligonucleotide
  misc_feature 1..20: note = Target: ANGPTL3; (+) strand; PAM type: NRG; PAM sequence: AAG
  source 1..20: mol_type = other DNA
tacaatagatccttttaaat

SEQ ID NO: 9311 - DNA, 20 bp, synthetic construct
  misc_feature 1..20: note = Description of Artificial Sequence: Synthetic oligonucleotide
  misc_feature 1..20: note = Target: ANGPTL3; (+) strand; PAM type: NRG; PAM sequence: AGG
  source 1..20: mol_type = other DNA
acaatagatccttttaaata

SEQ ID NO: 9312 - DNA, 20 bp, synthetic construct
  misc_feature 1..20: note = Description of Artificial Sequence: Synthetic oligonucleotide
  misc_feature 1..20: note = Target: ANGPTL3; (+) strand; PAM type: NRG; PAM sequence: TAG
  source 1..20: mol_type = other DNA
gatccttttaaataaggtcc

SEQ ID NO: 9313 - DNA, 20 bp, synthetic construct
  misc_feature 1..20: note = Description of Artificial Sequence: Synthetic oligonucleotide
  misc_feature 1..20: note = Target: ANGPTL3; (+) strand; PAM type: NRG; PAM sequence: AGG
  source 1..20: mol_type = other DNA
atccttttaaataaggtcct

SEQ ID NO: 9314 - DNA, 20 bp, synthetic construct
  misc_feature 1..20: note = Description of Artificial Sequence: Synthetic oligonucleotide
  misc_feature 1..20: note = Target: ANGPTL3; (+) strand; PAM type: NRG; PAM sequence: CAG
  source 1..20: mol_type = other DNA
ctaggaaatatcattcatgc

SEQ ID NO: 9315 - DNA, 20 bp, synthetic construct
  misc_feature 1..20: note = Description of Artificial Sequence: Synthetic oligonucleotide
  misc_feature 1..20: note = Target: ANGPTL3; (+) strand; PAM type: NRG; PAM sequence: AAG
  source 1..20: mol_type = other DNA
aaaactaacactaataatgc

SEQ ID NO: 9316 - DNA, 20 bp, synthetic construct
  misc_feature 1..20: note = Description of Artificial Sequence: Synthetic oligonucleotide
  misc_feature 1..20: note = Target: ANGPTL3; (+) strand; PAM type: NRG; PAM sequence: GAG
  source 1..20: mol_type = other DNA
ctgcttttcttactgtcaat

SEQ ID NO: 9317 - DNA, 20 bp, synthetic construct
  misc_feature 1..20: note = Description of Artificial Sequence: Synthetic oligonucleotide
  misc_feature 1..20: note = Target: ANGPTL3; (+) strand; PAM type: NRG; PAM sequence: TAG
  source 1..20: mol_type = other DNA
acgataaactactgaatata

SEQ ID NO: 9318 - DNA, 20 bp, synthetic construct
  misc_feature 1..20: note = Description of Artificial Sequence: Synthetic oligonucleotide
  misc_feature 1..20: note = Target: ANGPTL3; (+) strand; PAM type: NRG; PAM sequence: AAG
  source 1..20: mol_type = other DNA
taaactactgaatatataga

SEQ ID NO: 9319 - DNA, 20 bp, synthetic construct
  misc_feature 1..20: note = Description of Artificial Sequence: Synthetic oligonucleotide
  misc_feature 1..20: note = Target: ANGPTL3; (+) strand; PAM type: NRG; PAM sequence: AAG
  source 1..20: mol_type = other DNA
ctactgaatatatagaaagt

SEQ ID NO: 9320 - DNA, 20 bp, synthetic construct
  misc_feature 1..20: note = Description of Artificial Sequence: Synthetic oligonucleotide
  misc_feature 1..20: note = Target: ANGPTL3; (+) strand; PAM type: NRG; PAM sequence: CAG
  source 1..20: mol_type = other DNA
tgccaacctgccaacatcta

SEQ ID NO: 9321 - DNA, 20 bp, synthetic construct
  misc_feature 1..20: note = Description of Artificial Sequence: Synthetic oligonucleotide
  misc_feature 1..20: note = Target: ANGPTL3; (+) strand; PAM type: NRG; PAM sequence: CAG
  source 1..20: mol_type = other DNA
aacatctacagatatgttta

SEQ ID NO: 9322 - DNA, 20 bp, synthetic construct
  misc_feature 1..20: note = Description of Artificial Sequence: Synthetic oligonucleotide
  misc_feature 1..20: note = Target: ANGPTL3; (+) strand; PAM type: NRG; PAM sequence: AGG
  source 1..20: mol_type = other DNA
acatctacagatatgtttac

SEQ ID NO: 9323 - DNA, 20 bp, synthetic construct
  misc_feature 1..20: note = Description of Artificial Sequence: Synthetic oligonucleotide
  misc_feature 1..20: note = Target: ANGPTL3; (+) strand; PAM type: NRG; PAM sequence: AAG
  source 1..20: mol_type = other DNA
tcaaaaattatcaaattatc

SEQ ID NO: 9324 - DNA, 20 bp, synthetic construct
  misc_feature 1..20: note = Description of Artificial Sequence: Synthetic oligonucleotide
  misc_feature 1..20: note = Target: ANGPTL3; (+) strand; PAM type: NRG; PAM sequence: AAG
  source 1..20: mol_type = other DNA
aaattatcaaattatcaaga

SEQ ID NO: 9325 - DNA, 20 bp, synthetic construct
  misc_feature 1..20: note = Description of Artificial Sequence: Synthetic oligonucleotide
  misc_feature 1..20: note = Target: ANGPTL3; (+) strand; PAM type: NRG; PAM sequence: TGG
  source 1..20: mol_type = other DNA
atcaaattatcaagaaagcc

SEQ ID NO: 9326 - DNA, 20 bp, synthetic construct
  misc_feature 1..20: note = Description of Artificial Sequence: Synthetic oligonucleotide
  misc_feature 1..20: note = Target: ANGPTL3; (+) strand; PAM type: NRG; PAM sequence: CAG
  source 1..20: mol_type = other DNA
tatgtattatgtctttatca

SEQ ID NO: 9327 - DNA, 20 bp, synthetic construct
  misc_feature 1..20: note = Description of Artificial Sequence: Synthetic oligonucleotide
  misc_feature 1..20: note = Target: ANGPTL3; (+) strand; PAM type: NRG; PAM sequence: AGG
  source 1..20: mol_type = other DNA
atgtattatgtctttatcac

SEQ ID NO: 9328 - DNA, 20 bp, synthetic construct
  misc_feature 1..20: note = Description of Artificial Sequence: Synthetic oligonucleotide
  misc_feature 1..20: note = Target: ANGPTL3; (+) strand; PAM type: NRG; PAM sequence: AAG
  source 1..20: mol_type = other DNA
atgtctttatcacaggtctg

SEQ ID NO: 9329 - DNA, 20 bp, synthetic construct
  misc_feature 1..20: note = Description of Artificial Sequence: Synthetic oligonucleotide
  misc_feature 1..20: note = Target: ANGPTL3; (+) strand; PAM type: NRG; PAM sequence: CAG
  source 1..20: mol_type = other DNA
tttatcacaggtctgaagat

SEQ ID NO: 9330 - DNA, 20 bp, synthetic construct
  misc_feature 1..20: note = Description of Artificial Sequence: Synthetic oligonucleotide
  misc_feature 1..20: note = Target: ANGPTL3; (+) strand; PAM type: NRG; PAM sequence: AAG
  source 1..20: mol_type = other DNA
tcacaggtctgaagatcagt

SEQ ID NO: 9331 - DNA, 20 bp, synthetic construct
  misc_feature 1..20: note = Description of Artificial Sequence: Synthetic oligonucleotide
  misc_feature 1..20: note = Target: ANGPTL3; (+) strand; PAM type: NRG; PAM sequence: CAG
  source 1..20: mol_type = other DNA
tattaaacttaaaatctgaa

SEQ ID NO: 9332 - DNA, 20 bp, synthetic construct
  misc_feature 1..20: note = Description of Artificial Sequence: Synthetic oligonucleotide
  misc_feature 1..20: note = Target: ANGPTL3; (+) strand; PAM type: NRG; PAM sequence: AAG
  source 1..20: mol_type = other DNA
tattttattcatataaataa

SEQ ID NO: 9333 - DNA, 20 bp, synthetic construct
  misc_feature 1..20: note = Description of Artificial Sequence: Synthetic oligonucleotide
  misc_feature 1..20: note = Target: ANGPTL3; (+) strand; PAM type: NRG; PAM sequence: AAG
  source 1..20: mol_type = other DNA
agaatacattacaatattct

SEQ ID NO: 9334 - DNA, 20 bp, synthetic construct
  misc_feature 1..20: note = Description of Artificial Sequence: Synthetic oligonucleotide
  misc_feature 1..20: note = Target: ANGPTL3; (+) strand; PAM type: NRG; PAM sequence: AAG
  source 1..20: mol_type = other DNA
acattacaatattctaagca

SEQ ID NO: 9335 - DNA, 20 bp, synthetic construct
  misc_feature 1..20: note = Description of Artificial Sequence: Synthetic oligonucleotide
  misc_feature 1..20: note = Target: ANGPTL3; (+) strand; PAM type: NRG; PAM sequence: CAG
  source 1..20: mol_type = other DNA
ttacaatattctaagcaaag

SEQ ID NO: 9336 - DNA, 20 bp, synthetic construct
  misc_feature 1..20: note = Description of Artificial Sequence: Synthetic oligonucleotide
  misc_feature 1..20: note = Target: ANGPTL3; (+) strand; PAM type: NRG; PAM sequence: TGG
  source 1..20: mol_type = other DNA
agcaaagcagtctctacttt

SEQ ID NO: 9337 - DNA, 20 bp, synthetic construct
  misc_feature 1..20: note = Description of Artificial Sequence: Synthetic oligonucleotide
  misc_feature 1..20: note = Target: ANGPTL3; (+) strand; PAM type: NRG; PAM sequence: GAG
  source 1..20: mol_type = other DNA
tgtccctgattaaatatttt

SEQ ID NO: 9338 - DNA, 20 bp, synthetic construct
  misc_feature 1..20: note = Description of Artificial Sequence: Synthetic oligonucleotide
  misc_feature 1..20: note = Target: ANGPTL3; (+) strand; PAM type: NRG; PAM sequence: CAG
  source 1..20: mol_type = other DNA
ctgattaaatattttgagaa

SEQ ID NO: 9339 - DNA, 20 bp, synthetic construct
  misc_feature 1..20: note = Description of Artificial Sequence: Synthetic oligonucleotide
  misc_feature 1..20: note = Target: ANGPTL3; (+) strand; PAM type: NRG; PAM sequence: AGG
  source 1..20: mol_type = other DNA
tgattaaatattttgagaac

SEQ ID NO: 9340 - DNA, 20 bp, synthetic construct
  misc_feature 1..20: note = Description of Artificial Sequence: Synthetic oligonucleotide
  misc_feature 1..20: note = Target: ANGPTL3; (+) strand; PAM type: NRG; PAM sequence: AAG
  source 1..20: mol_type = other DNA
gttataacattatgaactga

SEQ ID NO: 9341 - DNA, 20 bp, synthetic construct
  misc_feature 1..20: note = Description of Artificial Sequence: Synthetic oligonucleotide
  misc_feature 1..20: note = Target: ANGPTL3; (+) strand; PAM type: NRG; PAM sequence: CAG
  source 1..20: mol_type = other DNA
gtacttctgacatccttact

SEQ ID NO: 9342 - DNA, 20 bp, synthetic construct
  misc_feature 1..20: note = Description of Artificial Sequence: Synthetic oligonucleotide
  misc_feature 1..20: note = Target: ANGPTL3; (+) strand; PAM type: NRG; PAM sequence: CAG
  source 1..20: mol_type = other DNA
atttcccctaattgtatatt

SEQ ID NO: 9343 - DNA, 20 bp, synthetic construct
  misc_feature 1..20: note = Description of Artificial Sequence: Synthetic oligonucleotide
  misc_feature 1..20: note = Target: ANGPTL3; (+) strand; PAM type: NRG; PAM sequence: CAG
  source 1..20: mol_type = other DNA
ttcagtatcattttaaaaaa

SEQ ID NO: 9344 - DNA, 20 bp, synthetic construct
  misc_feature 1..20: note = Description of Artificial Sequence: Synthetic oligonucleotide
  misc_feature 1..20: note = Target: ANGPTL3; (+) strand; PAM type: NRG; PAM sequence: CAG
  source 1..20: mol_type = other DNA
acagatttatattcttttat

SEQ ID NO: 9345 - DNA, 20 bp, synthetic construct
  misc_feature 1..20: note = Description of Artificial Sequence: Synthetic oligonucleotide
  misc_feature 1..20: note = Target: ANGPTL3; (+) strand; PAM type: NRG; PAM sequence: CAG
  source 1..20: mol_type = other DNA
tttatattcttttatcagct

SEQ ID NO: 9346 - DNA, 20 bp, synthetic construct
  misc_feature 1..20: note = Description of Artificial Sequence: Synthetic oligonucleotide
  misc_feature 1..20: note = Target: ANGPTL3; (+) strand; PAM type: NRG; PAM sequence: AAG
  source 1..20: mol_type = other DNA
atattcttttatcagctcag

SEQ ID NO: 9347 - DNA, 20 bp, synthetic construct
  misc_feature 1..20: note = Description of Artificial Sequence: Synthetic oligonucleotide
  misc_feature 1..20: note = Target: ANGPTL3; (+) strand; PAM type: NRG; PAM sequence: AGG
  source 1..20: mol_type = other DNA
tattcttttatcagctcaga

SEQ ID NO: 9348 - DNA, 20 bp, synthetic construct
  misc_feature 1..20: note = Description of Artificial Sequence: Synthetic oligonucleotide
  misc_feature 1..20: note = Target: ANGPTL3; (+) strand; PAM type: NRG; PAM sequence: TAG
  source 1..20: mol_type = other DNA
ttttatcagctcagaaggac

SEQ ID NO: 9349 - DNA, 20 bp, synthetic construct
  misc_feature 1..20: note = Description of Artificial Sequence: Synthetic oligonucleotide
  misc_feature 1..20: note = Target: ANGPTL3; (+) strand; PAM type: NRG; PAM sequence: AAG
  source 1..20: mol_type = other DNA
gctcagaaggactagtattc

SEQ ID NO: 9350 - DNA, 20 bp, synthetic construct
  misc_feature 1..20: note = Description of Artificial Sequence: Synthetic oligonucleotide
  misc_feature 1..20: note = Target: ANGPTL3; (+) strand; PAM type: NRG; PAM sequence: CAG
  source 1..20: mol_type = other DNA
gactagtattcaagaaccca

SEQ ID NO: 9351 - DNA, 20 bp, synthetic construct
  misc_feature 1..20: note = Description of Artificial Sequence: Synthetic oligonucleotide
  misc_feature 1..20: note = Target: ANGPTL3; (+) strand; PAM type: NRG; PAM sequence: AAG
  source 1..20: mol_type = other DNA
cagaaatttctctatcttcc

SEQ ID NO: 9352 - DNA, 20 bp, synthetic construct
  misc_feature 1..20: note = Description of Artificial Sequence: Synthetic oligonucleotide
  misc_feature 1..20: note = Target: ANGPTL3; (+) strand; PAM type: NRG; PAM sequence: AAG
  source 1..20: mol_type = other DNA
atttctctatcttccaagcc

SEQ ID NO: 9353 - DNA, 20 bp, synthetic construct
  misc_feature 1..20: note = Description of Artificial Sequence: Synthetic oligonucleotide
  misc_feature 1..20: note = Target: ANGPTL3; (+) strand; PAM type: NRG; PAM sequence: GAG
  source 1..20: mol_type = other DNA
ttctctatcttccaagccaa

SEQ ID NO: 9354 - DNA, 20 bp, synthetic construct
  misc_feature 1..20: note = Description of Artificial Sequence: Synthetic oligonucleotide
  misc_feature 1..20: note = Target: ANGPTL3; (+) strand; PAM type: NRG; PAM sequence: AAG
  source 1..20: mol_type = other DNA
tcttccaagccaagagcacc

SEQ ID NO: 9355 - DNA, 20 bp, synthetic construct
  misc_feature 1..20: note = Description of Artificial Sequence: Synthetic oligonucleotide
  misc_feature 1..20: note = Target: ANGPTL3; (+) strand; PAM type: NRG; PAM sequence: CAG
  source 1..20: mol_type = other DNA
caagaactactccctttctt

SEQ ID NO: 9356 - DNA, 20 bp, synthetic construct
  misc_feature 1..20: note = Description of Artificial Sequence: Synthetic oligonucleotide
  misc_feature 1..20: note = Target: ANGPTL3; (+) strand; PAM type: NRG; PAM sequence: AAG
  source 1..20: mol_type = other DNA
tttcttcagttgaatgaaat

SEQ ID NO: 9357 - DNA, 20 bp, synthetic construct
  misc_feature 1..20: note = Description of Artificial Sequence: Synthetic oligonucleotide
  misc_feature 1..20: note = Target: ANGPTL3; (+) strand; PAM type: NRG; PAM sequence: TGG
  source 1..20: mol_type = other DNA
ataagaaatgtaaaacatga

SEQ ID NO: 9358 - DNA, 20 bp, synthetic construct
  misc_feature 1..20: note = Description of Artificial Sequence: Synthetic oligonucleotide
  misc_feature 1..20: note = Target: ANGPTL3; (+) strand; PAM type: NRG; PAM sequence: AAG
  source 1..20: mol_type = other DNA
gaaatgtaaaacatgatggt

SEQ ID NO: 9359 - DNA, 20 bp, synthetic construct
  misc_feature 1..20: note = Description of Artificial Sequence: Synthetic oligonucleotide
  misc_feature 1..20: note = Target: ANGPTL3; (+) strand; PAM type: NRG; PAM sequence: TGG
  source 1..20: mol_type = other DNA
aacatgatggtaagacactt

SEQ ID NO: 9360 - DNA, 20 bp, synthetic construct
  misc_feature 1..20: note = Description of Artificial Sequence: Synthetic oligonucleotide
  misc_feature 1..20: note = Target: ANGPTL3; (+) strand; PAM type: NRG; PAM sequence: TGG
  source 1..20: mol_type = other DNA
atgatggtaagacactttgg

SEQ ID NO: 9361 - DNA, 20 bp, synthetic construct
  misc_feature 1..20: note = Description of Artificial Sequence: Synthetic oligonucleotide
  misc_feature 1..20: note = Target: ANGPTL3; (+) strand; PAM type: NRG; PAM sequence: GGG
  source 1..20: mol_type = other DNA
tgatggtaagacactttggt

SEQ ID NO: 9362 - DNA, 20 bp, synthetic construct
  misc_feature 1..20: note = Description of Artificial Sequence: Synthetic oligonucleotide
  misc_feature 1..20: note = Target: ANGPTL3; (+) strand; PAM type: NRG; PAM sequence: AAG
  source 1..20: mol_type = other DNA
tttggtgggtttccttcttg

SEQ ID NO: 9363 - DNA, 20 bp, synthetic construct
  misc_feature 1..20: note = Description of Artificial Sequence: Synthetic oligonucleotide
  misc_feature 1..20: note = Target: ANGPTL3; (+) strand; PAM type: NRG; PAM sequence: TAG
  source 1..20: mol_type = other DNA
attatcaaattccctattct

SEQ ID NO: 9364 - DNA, 20 bp, synthetic construct
  misc_feature 1..20: note = Description of Artificial Sequence: Synthetic oligonucleotide
  misc_feature 1..20: note = Target: ANGPTL3; (+) strand; PAM type: NRG; PAM sequence: AGG
  source 1..20: mol_type = other DNA
ttatcaaattccctattctt

SEQ ID NO: 9365 - DNA, 20 bp, synthetic construct
  misc_feature 1..20: note = Description of Artificial Sequence: Synthetic oligonucleotide
  misc_feature 1..20: note = Target: ANGPTL3; (+) strand; PAM type: NRG; PAM sequence: TAG
  source 1..20: mol_type = other DNA
cctattcttaggacttgttc

SEQ ID NO: 9366 - DNA, 20 bp, synthetic construct
  misc_feature 1..20: note = Description of Artificial Sequence: Synthetic oligonucleotide
  misc_feature 1..20: note = Target: ANGPTL3; (+) strand; PAM type: NRG; PAM sequence: AAG
  source 1..20: mol_type = other DNA
taggacttgttctagactaa

SEQ ID NO: 9367 - DNA, 20 bp, synthetic construct
  misc_feature 1..20: note = Description of Artificial Sequence: Synthetic oligonucleotide
  misc_feature 1..20: note = Target: ANGPTL3; (+) strand; PAM type: NRG; PAM sequence: TAG
  source 1..20: mol_type = other DNA
acttgttctagactaaaaga

SEQ ID NO: 9368 - DNA, 20 bp, synthetic construct
  misc_feature 1..20: note = Description of Artificial Sequence: Synthetic oligonucleotide
  misc_feature 1..20: note = Target: ANGPTL3; (+) strand; PAM type: NRG; PAM sequence: AAG
  source 1..20: mol_type = other DNA
ttctagactaaaagatagtt

SEQ ID NO: 9369 - DNA, 20 bp, synthetic construct
  misc_feature 1..20: note = Description of Artificial Sequence: Synthetic oligonucleotide
  misc_feature 1..20: note = Target: ANGPTL3; (+) strand; PAM type: NRG; PAM sequence: GAG
  source 1..20: mol_type = other DNA
ctagactaaaagatagttaa

SEQ ID NO: 9370 - DNA, 20 bp, synthetic construct
  misc_feature 1..20: note = Description of Artificial Sequence: Synthetic oligonucleotide
  misc_feature 1..20: note = Target: ANGPTL3; (+) strand; PAM type: NRG; PAM sequence: TGG
  source 1..20: mol_type = other DNA
tacaatgtatcaacctaaac

SEQ ID NO: 9371 - DNA, 20 bp, synthetic construct
  misc_feature 1..20: note = Description of Artificial Sequence: Synthetic oligonucleotide
  misc_feature 1..20: note = Target: ANGPTL3; (+) strand; PAM type: NRG; PAM sequence: TGG
  source 1..20: mol_type = other DNA
tatcaacctaaactggatgc

SEQ ID NO: 9372 - DNA, 20 bp, synthetic construct
  misc_feature 1..20: note = Description of Artificial Sequence: Synthetic oligonucleotide
  misc_feature 1..20: note = Target: ANGPTL3; (+) strand; PAM type: NRG; PAM sequence: GGG
  source 1..20: mol_type = other DNA
atcaacctaaactggatgct

SEQ ID NO: 9373 - DNA, 20 bp, synthetic construct
  misc_feature 1..20: note = Description of Artificial Sequence: Synthetic oligonucleotide
  misc_feature 1..20: note = Target: ANGPTL3; (+) strand; PAM type: NRG; PAM sequence: GGG
  source 1..20: mol_type = other DNA
tcaacctaaactggatgctg

SEQ ID NO: 9374 - DNA, 20 bp, synthetic construct
  misc_feature 1..20: note = Description of Artificial Sequence: Synthetic oligonucleotide
  misc_feature 1..20: note = Target: ANGPTL3; (+) strand; PAM type: NRG; PAM sequence: AAG
  source 1..20: mol_type = other DNA
gttctttttacaccctataa

SEQ ID NO: 9375 - DNA, 20 bp, synthetic construct
  misc_feature 1..20: note = Description of Artificial Sequence: Synthetic oligonucleotide
  misc_feature 1..20: note = Target: ANGPTL3; (+) strand; PAM type: NRG; PAM sequence: AAG
  source 1..20: mol_type = other DNA
accctataaaagacatacct

SEQ ID NO: 9376 - DNA, 20 bp, synthetic construct
  misc_feature 1..20: note = Description of Artificial Sequence: Synthetic oligonucleotide
  misc_feature 1..20: note = Target: ANGPTL3; (+) strand; PAM type: NRG; PAM sequence: CAG
  source 1..20: mol_type = other DNA
aaagacatacctaagacaat

SEQ ID NO: 9377 - DNA, 20 bp, synthetic construct
  misc_feature 1..20: note = Description of Artificial Sequence: Synthetic oligonucleotide
  misc_feature 1..20: note = Target: ANGPTL3; (+) strand; PAM type: NRG; PAM sequence: GAG
  source 1..20: mol_type = other DNA
agacatacctaagacaatca

SEQ ID NO: 9378 - DNA, 20 bp, synthetic construct
  misc_feature 1..20: note = Description of Artificial Sequence: Synthetic oligonucleotide
  misc_feature 1..20: note = Target: ANGPTL3; (+) strand; PAM type: NRG; PAM sequence: TGG
  source 1..20: mol_type = other DNA
caatcagagaaatacaaata

SEQ ID NO: 9379 - DNA, 20 bp, synthetic construct
  misc_feature 1..20: note = Description of Artificial Sequence: Synthetic oligonucleotide
  misc_feature 1..20: note = Target: ANGPTL3; (+) strand; PAM type: NRG; PAM sequence: TAG
  source 1..20: mol_type = other DNA
acaaatatggacttgattat

SEQ ID NO: 9380 - DNA, 20 bp, synthetic construct
  misc_feature 1..20: note = Description of Artificial Sequence: Synthetic oligonucleotide
  misc_feature 1..20: note = Target: ANGPTL3; (+) strand; PAM type: NRG; PAM sequence: TAG
  source 1..20: mol_type = other DNA
gacttgattattagataata

SEQ ID NO: 9381 - DNA, 20 bp, synthetic construct
  misc_feature 1..20: note = Description of Artificial Sequence: Synthetic oligonucleotide
  misc_feature 1..20: note = Target: ANGPTL3; (+) strand; PAM type: NRG; PAM sequence: AAG
  source 1..20: mol_type = other DNA
ttgattattagataatatag

SEQ ID NO: 9382 - DNA, 20 bp, synthetic construct
  misc_feature 1..20: note = Description of Artificial Sequence: Synthetic oligonucleotide
  misc_feature 1..20: note = Target: ANGPTL3; (+) strand; PAM type: NRG; PAM sequence: AGG
  source 1..20: mol_type = other DNA
tgattattagataatataga

SEQ ID NO: 9383 - DNA, 20 bp, synthetic construct
  misc_feature 1..20: note = Description of Artificial Sequence: Synthetic oligonucleotide
  misc_feature 1..20: note = Target: ANGPTL3; (+) strand; PAM type: NRG; PAM sequence: TAG
  source 1..20: mol_type = other DNA
agaaggtttattaattttct

SEQ ID NO: 9384 - DNA, 20 bp, synthetic construct
  misc_feature 1..20: note = Description of Artificial Sequence: Synthetic oligonucleotide
  misc_feature 1..20: note = Target: ANGPTL3; (+) strand; PAM type: NRG; PAM sequence: TGG
  source 1..20: mol_type = other DNA
aattttcttagatgtgatca

SEQ ID NO: 9385 - DNA, 20 bp, synthetic construct
  misc_feature 1..20: note = Description of Artificial Sequence: Synthetic oligonucleotide
  misc_feature 1..20: note = Target: ANGPTL3; (+) strand; PAM type: NRG; PAM sequence: CAG
  source 1..20: mol_type = other DNA
tagatgtgatcatggtattg

SEQ ID NO: 9386 - DNA, 20 bp, synthetic construct
  misc_feature 1..20: note = Description of Artificial Sequence: Synthetic oligonucleotide
  misc_feature 1..20: note = Target: ANGPTL3; (+) strand; PAM type: NRG; PAM sequence: AAG
  source 1..20: mol_type = other DNA
atcatggtattgcagtttta

SEQ ID NO: 9387 - DNA, 20 bp, synthetic construct
  misc_feature 1..20: note = Description of Artificial Sequence: Synthetic oligonucleotide
  misc_feature 1..20: note = Target: ANGPTL3; (+) strand; PAM type: NRG; PAM sequence: AGG
  source 1..20: mol_type = other DNA
tcatggtattgcagttttaa

SEQ ID NO: 9388 - DNA, 20 bp, synthetic construct
  misc_feature 1..20: note = Description of Artificial Sequence: Synthetic oligonucleotide
  misc_feature 1..20: note = Target: ANGPTL3; (+) strand; PAM type: NRG; PAM sequence: GAG
  source 1..20: mol_type = other DNA
atggtattgcagttttaaag

SEQ ID NO: 9389 - DNA, 20 bp, synthetic construct
  misc_feature 1..20: note = Description of Artificial Sequence: Synthetic oligonucleotide
  misc_feature 1..20: note = Target: ANGPTL3; (+) strand; PAM type: NRG; PAM sequence: AAG
  source 1..20: mol_type = other DNA
aggagaacaatctcctgttt

SEQ ID NO: 9390 - DNA, 20 bp, synthetic construct
  misc_feature 1..20: note = Description of Artificial Sequence: Synthetic oligonucleotide
  misc_feature 1..20: note = Target: ANGPTL3; (+) strand; PAM type: NRG; PAM sequence: GAG
  source 1..20: mol_type = other DNA
gagaacaatctcctgtttaa

SEQ ID NO: 9391 - DNA, 20 bp, synthetic construct
  misc_feature 1..20: note = Description of Artificial Sequence: Synthetic oligonucleotide
  misc_feature 1..20: note = Target: ANGPTL3; (+) strand; PAM type: NRG; PAM sequence: CGG
  source 1..20: mol_type = other DNA
gatacatgctgaaatattta

SEQ ID NO: 9392 - DNA, 20 bp, synthetic construct
  misc_feature 1..20: note = Description of Artificial Sequence: Synthetic oligonucleotide
  misc_feature 1..20: note = Target: ANGPTL3; (+) strand; PAM type: NRG; PAM sequence: GAG
  source 1..20: mol_type = other DNA
tacatgctgaaatatttacg

SEQ ID NO: 9393 - DNA, 20 bp, synthetic construct
  misc_feature 1..20: note = Description of Artificial Sequence: Synthetic oligonucleotide
  misc_feature 1..20: note = Target: ANGPTL3; (+) strand; PAM type: NRG; PAM sequence: AAG
  source 1..20: mol_type = other DNA
ctgaaatatttacggagtta

SEQ ID NO: 9394 - DNA, 20 bp, synthetic construct
  misc_feature 1..20: note = Description of Artificial Sequence: Synthetic oligonucleotide
  misc_feature 1..20: note = Target: ANGPTL3; (+) strand; PAM type: NRG; PAM sequence: AGG
  source 1..20: mol_type = other DNA
tgaaatatttacggagttaa

SEQ ID NO: 9395 - DNA, 20 bp, synthetic construct
  misc_feature 1..20: note = Description of Artificial Sequence: Synthetic oligonucleotide
  misc_feature 1..20: note = Target: ANGPTL3; (+) strand; PAM type: NRG; PAM sequence: TGG
  source 1..20: mol_type = other DNA
tttacggagttaaaggtcac

SEQ ID NO: 9396 - DNA, 20 bp, synthetic construct
  misc_feature 1..20: note = Description of Artificial Sequence: Synthetic oligonucleotide
  misc_feature 1..20: note = Target: ANGPTL3; (+) strand; PAM type: NRG; PAM sequence: CAG
  source 1..20: mol_type = other DNA
agttaaaggtcactggactc

SEQ ID NO: 9397 - DNA, 20 bp, synthetic construct
  misc_feature 1..20: note = Description of Artificial Sequence: Synthetic oligonucleotide
  misc_feature 1..20: note = Target: ANGPTL3; (+) strand; PAM type: NRG; PAM sequence: TGG
  source 1..20: mol_type = other DNA
aaggtcactggactccagac

SEQ ID NO: 9398 - DNA, 20 bp, synthetic construct
  misc_feature 1..20: note = Description of Artificial Sequence: Synthetic oligonucleotide
  misc_feature 1..20: note = Target: ANGPTL3; (+) strand; PAM type: NRG; PAM sequence: TAG
  source 1..20: mol_type = other DNA
actggactccagactggtga

SEQ ID NO: 9399 - DNA, 20 bp, synthetic construct
  misc_feature 1..20: note = Description of Artificial Sequence: Synthetic oligonucleotide
  misc_feature 1..20: note = Target: ANGPTL3; (+) strand; PAM type: NRG; PAM sequence: AAG
  source 1..20: mol_type = other DNA
ctccagactggtgatagaac

SEQ ID NO: 9400 - DNA, 20 bp, synthetic construct
  misc_feature 1..20: note = Description of Artificial Sequence: Synthetic oligonucleotide
  misc_feature 1..20: note = Target: ANGPTL3; (+) strand; PAM type: NRG; PAM sequence: AAG
  source 1..20: mol_type = other DNA
aaaaataattaattttttaa

SEQ ID NO: 9401 - DNA, 20 bp, synthetic construct
  misc_feature 1..20: note = Description of Artificial Sequence: Synthetic oligonucleotide
  misc_feature 1..20: note = Target: ANGPTL3; (+) strand; PAM type: NRG; PAM sequence: TAG
  source 1..20: mol_type = other DNA
attaattttttaaaagaaaa

SEQ ID NO: 9402 - DNA, 20 bp, synthetic construct
  misc_feature 1..20: note = Description of Artificial Sequence: Synthetic oligonucleotide
  misc_feature 1..20: note = Target: ANGPTL3; (+) strand; PAM type: NRG; PAM sequence: TGG
  source 1..20: mol_type = other DNA
ttttttaaaagaaaatagtt

SEQ ID NO: 9403 - DNA, 20 bp, synthetic construct
  misc_feature 1..20: note = Description of Artificial Sequence: Synthetic oligonucleotide
  misc_feature 1..20: note = Target: ANGPTL3; (+) strand; PAM type: NRG; PAM sequence: AAG
  source 1..20: mol_type = other DNA
ttaaaagaaaatagtttggt

SEQ ID NO: 9404 - DNA, 20 bp, synthetic construct
  misc_feature 1..20: note = Description of Artificial Sequence: Synthetic oligonucleotide
  misc_feature 1..20: note = Target: ANGPTL3; (+) strand; PAM type: NRG; PAM sequence: AAG
  source 1..20: mol_type = other DNA
tcttaaataacacgccatct

SEQ ID NO: 9405 - DNA, 20 bp, synthetic construct
  misc_feature 1..20: note = Description of Artificial Sequence: Synthetic oligonucleotide
  misc_feature 1..20: note = Target: ANGPTL3; (+) strand; PAM type: NRG; PAM sequence: AAG
  source 1..20: mol_type = other DNA
ccacaacttcataaaatgtc

SEQ ID NO: 9406 - DNA, 20 bp, synthetic construct
  misc_feature 1..20: note = Description of Artificial Sequence: Synthetic oligonucleotide
  misc_feature 1..20: note = Target: ANGPTL3; (+) strand; PAM type: NRG; PAM sequence: AAG
  source 1..20: mol_type = other DNA
aaaatgtcaagtgaaatctc

SEQ ID NO: 9407 - DNA, 20 bp, synthetic construct
  misc_feature 1..20: note = Description of Artificial Sequence: Synthetic oligonucleotide
  misc_feature 1..20: note = Target: ANGPTL3; (+) strand; PAM type: NRG; PAM sequence: AAG
  source 1..20: mol_type = other DNA
aagtgaaatctcaagctcca

SEQ ID NO: 9408 - DNA, 20 bp, synthetic construct
  misc_feature 1..20: note = Description of Artificial Sequence: Synthetic oligonucleotide
  misc_feature 1..20: note = Target: ANGPTL3; (+) strand; PAM type: NRG; PAM sequence: TAG
  source 1..20: mol_type = other DNA
taataacattttattgattc

SEQ ID NO: 9409 - DNA, 20 bp, synthetic construct
  misc_feature 1..20: note = Description of Artificial Sequence: Synthetic oligonucleotide
  misc_feature 1..20: note = Target: ANGPTL3; (+) strand; PAM type: NRG; PAM sequence: AGG
  source 1..20: mol_type = other DNA
aataacattttattgattct

SEQ ID NO: 9410 - DNA, 20 bp, synthetic construct
  misc_feature 1..20: note = Description of Artificial Sequence: Synthetic oligonucleotide
  misc_feature 1..20: note = Target: ANGPTL3; (+) strand; PAM type: NRG; PAM sequence: CAG
  source 1..20: mol_type = other DNA
gaatgtaccaccatttataa

SEQ ID NO: 9411 - DNA, 20 bp, synthetic construct
  misc_feature 1..20: note = Description of Artificial Sequence: Synthetic oligonucleotide
  misc_feature 1..20: note = Target: ANGPTL3; (+) strand; PAM type: NRG; PAM sequence: GAG
  source 1..20: mol_type = other DNA
atgtaccaccatttataaca

SEQ ID NO: 9412 - DNA, 20 bp, synthetic construct
  misc_feature 1..20: note = Description of Artificial Sequence: Synthetic oligonucleotide
  misc_feature 1..20: note = Target: ANGPTL3; (+) strand; PAM type: NRG; PAM sequence: AGG
  source 1..20: mol_type = other DNA
tgtaccaccatttataacag

SEQ ID NO: 9413 - DNA, 20 bp, synthetic construct
  misc_feature 1..20: note = Description of Artificial Sequence: Synthetic oligonucleotide
  misc_feature 1..20: note = Target: ANGPTL3; (+) strand; PAM type: NRG; PAM sequence: AAG
  source 1..20: mol_type = other DNA
tataacagaggtgaacatac

SEQ ID NO: 9414 - DNA, 20 bp, synthetic construct
  misc_feature 1..20: note = Description of Artificial Sequence: Synthetic oligonucleotide
  misc_feature 1..20: note = Target: ANGPTL3; (+) strand; PAM type: NRG; PAM sequence: TGG
  source 1..20: mol_type = other DNA
aacagaggtgaacatacaag

SEQ ID NO: 9415 - DNA, 20 bp, synthetic construct
  misc_feature 1..20: note = Description of Artificial Sequence: Synthetic oligonucleotide
  misc_feature 1..20: note = Target: ANGPTL3; (+) strand; PAM type: NRG; PAM sequence: CAG
  source 1..20: mol_type = other DNA
acaagtggcatgtatgccat

SEQ ID NO: 9416 - DNA, 20 bp, synthetic construct
  misc_feature 1..20: note = Description of Artificial Sequence: Synthetic oligonucleotide
  misc_feature 1..20: note = Target: ANGPTL3; (+) strand; PAM type: NRG; PAM sequence: CAG
  source 1..20: mol_type = other DNA
ggcatgtatgccatcagacc

SEQ ID NO: 9417 - DNA, 20 bp, synthetic construct
  misc_feature 1..20: note = Description of Artificial Sequence: Synthetic oligonucleotide
  misc_feature 1..20: note = Target: ANGPTL3; (+) strand; PAM type: NRG; PAM sequence: AAG
  source 1..20: mol_type = other DNA
catcagacccagcaactctc

SEQ ID NO: 9418 - DNA, 20 bp, synthetic construct
  misc_feature 1..20: note = Description of Artificial Sequence: Synthetic oligonucleotide
  misc_feature 1..20: note = Target: ANGPTL3; (+) strand; PAM type: NRG; PAM sequence: CAG
  source 1..20: mol_type = other DNA
tgtctactgtgatgttatat

SEQ ID NO: 9419 - DNA, 20 bp, synthetic construct
  misc_feature 1..20: note = Description of Artificial Sequence: Synthetic oligonucleotide
  misc_feature 1..20: note = Target: ANGPTL3; (+) strand; PAM type: NRG; PAM sequence: AGG
  source 1..20: mol_type = other DNA
gtctactgtgatgttatatc

SEQ ID NO: 9420 - DNA, 20 bp, synthetic construct
  misc_feature 1..20: note = Description of Artificial Sequence: Synthetic oligonucleotide
  misc_feature 1..20: note = Target: ANGPTL3; (+) strand; PAM type: NRG; PAM sequence: AAG
  source 1..20: mol_type = other DNA
atatcaggtaaaacctgtct

SEQ ID NO: 9421 - DNA, 20 bp, synthetic construct
  misc_feature 1..20: note = Description of Artificial Sequence: Synthetic oligonucleotide
  misc_feature 1..20: note = Target: ANGPTL3; (+) strand; PAM type: NRG; PAM sequence: AGG
  source 1..20: mol_type = other DNA
tatcaggtaaaacctgtcta

SEQ ID NO: 9422 - DNA, 20 bp, synthetic construct
  misc_feature 1..20: note = Description of Artificial Sequence: Synthetic oligonucleotide
  misc_feature 1..20: note = Target: ANGPTL3; (+) strand; PAM type: NRG; PAM sequence: GAG
  source 1..20: mol_type = other DNA
tcaggtaaaacctgtctaag

SEQ ID NO: 9423 - DNA, 20 bp, synthetic construct
  misc_feature 1..20: note = Description of Artificial Sequence: Synthetic oligonucleotide
  misc_feature 1..20: note = Target: ANGPTL3; (+) strand; PAM type: NRG; PAM sequence: TAG
  source 1..20: mol_type = other DNA
taaaacctgtctaaggagaa

SEQ ID NO: 9424 - DNA, 20 bp, synthetic construct
  misc_feature 1..20: note = Description of Artificial Sequence: Synthetic oligonucleotide
  misc_feature 1..20: note = Target: ANGPTL3; (+) strand; PAM type: NRG; PAM sequence: CAG
  source 1..20: mol_type = other DNA
acctgtctaaggagaataga

SEQ ID NO: 9425 - DNA, 20 bp, synthetic construct
  misc_feature 1..20: note = Description of Artificial Sequence: Synthetic oligonucleotide
  misc_feature 1..20: note = Target: ANGPTL3; (+) strand; PAM type: NRG; PAM sequence: TAG
  source 1..20: mol_type = other DNA
tgtctaaggagaatagacag

SEQ ID NO: 9426 - DNA, 20 bp, synthetic construct
  misc_feature 1..20: note = Description of Artificial Sequence: Synthetic oligonucleotide
  misc_feature 1..20: note = Target: ANGPTL3; (+) strand; PAM type: NRG; PAM sequence: TAG
  source 1..20: mol_type = other DNA
taaggagaatagacagtagt

SEQ ID NO: 9427 - DNA, 20 bp, synthetic construct
  misc_feature 1..20: note = Description of Artificial Sequence: Synthetic oligonucleotide
  misc_feature 1..20: note = Target: ANGPTL3; (+) strand; PAM type: NRG; PAM sequence: TAG
  source 1..20: mol_type = other DNA
tcaacttactcattacgtat

SEQ ID NO: 9428 - DNA, 20 bp, synthetic construct
  misc_feature 1..20: note = Description of Artificial Sequence: Synthetic oligonucleotide
  misc_feature 1..20: note = Target: ANGPTL3; (+) strand; PAM type: NRG; PAM sequence: AGG
  source 1..20: mol_type = other DNA
caacttactcattacgtatt

SEQ ID NO: 9429 - DNA, 20 bp, synthetic construct
  misc_feature 1..20: note = Description of Artificial Sequence: Synthetic oligonucleotide
  misc_feature 1..20: note = Target: ANGPTL3; (+) strand; PAM type: NRG; PAM sequence: AAG
  source 1..20: mol_type = other DNA
cttactcattacgtattagg

SEQ ID NO: 9430 - DNA, 20 bp, synthetic construct
  misc_feature 1..20: note = Description of Artificial Sequence: Synthetic oligonucleotide
  misc_feature 1..20: note = Target: ANGPTL3; (+) strand; PAM type: NRG; PAM sequence: TGG
  source 1..20: mol_type = other DNA
acgtattaggaagattaacc

SEQ ID NO: 9431 - DNA, 20 bp, synthetic construct
  misc_feature 1..20: note = Description of Artificial Sequence: Synthetic oligonucleotide
  misc_feature 1..20: note = Target: ANGPTL3; (+) strand; PAM type: NRG; PAM sequence: GAG
  source 1..20: mol_type = other DNA
tatatatatgaaatatatat

SEQ ID NO: 9432 - DNA, 20 bp, synthetic construct
  misc_feature 1..20: note = Description of Artificial Sequence: Synthetic oligonucleotide
  misc_feature 1..20: note = Target: ANGPTL3; (+) strand; PAM type: NRG; PAM sequence: AAG
  source 1..20: mol_type = other DNA
ttttcctctaaaataatctg

SEQ ID NO: 9433 - DNA, 20 bp, synthetic construct
  misc_feature 1..20: note = Description of Artificial Sequence: Synthetic oligonucleotide
  misc_feature 1..20: note = Target: ANGPTL3; (+) strand; PAM type: NRG; PAM sequence: AAG
  source 1..20: mol_type = other DNA
ctgaagtgactattatcaat

SEQ ID NO: 9434 - DNA, 20 bp, synthetic construct
  misc_feature 1..20: note = Description of Artificial Sequence: Synthetic oligonucleotide
  misc_feature 1..20: note = Target: ANGPTL3; (+) strand; PAM type: NRG; PAM sequence: TGG
  source 1..20: mol_type = other DNA
attgcctttcacttaacttt

SEQ ID NO: 9435 - DNA, 20 bp, synthetic construct
  misc_feature 1..20: note = Description of Artificial Sequence: Synthetic oligonucleotide
  misc_feature 1..20: note = Target: ANGPTL3; (+) strand; PAM type: NRG; PAM sequence: GGG
  source 1..20: mol_type = other DNA
ttgcctttcacttaactttt

SEQ ID NO: 9436 - DNA, 20 bp, synthetic construct
  misc_feature 1..20: note = Description of Artificial Sequence: Synthetic oligonucleotide
  misc_feature 1..20: note = Target: ANGPTL3; (+) strand; PAM type: NRG; PAM sequence: AAG
  source 1..20: mol_type = other DNA
ttaaaatcaaacaaacaaaa

SEQ ID NO: 9437 - DNA, 20 bp, synthetic construct
  misc_feature 1..20: note = Description of Artificial Sequence: Synthetic oligonucleotide
  misc_feature 1..20: note = Target: ANGPTL3; (+) strand; PAM type: NRG; PAM sequence: CAG
  source 1..20: mol_type = other DNA
atgatttcattcattatatt

SEQ ID NO: 9438 - DNA, 20 bp, synthetic construct
  misc_feature 1..20: note = Description of Artificial Sequence: Synthetic oligonucleotide
  misc_feature 1..20: note = Target: ANGPTL3; (+) strand; PAM type: NRG; PAM sequence: AGG
  source 1..20: mol_type = other DNA
tgatttcattcattatattc

SEQ ID NO: 9439 - DNA, 20 bp, synthetic construct
  misc_feature 1..20: note = Description of Artificial Sequence: Synthetic oligonucleotide
  misc_feature 1..20: note = Target: ANGPTL3; (+) strand; PAM type: NRG; PAM sequence: TAG
  source 1..20: mol_type = other DNA
tttcattcattatattcagg

SEQ ID NO: 9440 - DNA, 20 bp, synthetic construct
  misc_feature 1..20: note = Description of Artificial Sequence: Synthetic oligonucleotide
  misc_feature 1..20: note = Target: ANGPTL3; (+) strand; PAM type: NRG; PAM sequence: TGG
  source 1..20: mol_type = other DNA
cattatattcaggtagtcca

SEQ ID NO: 9441 - DNA, 20 bp, synthetic construct
  misc_feature 1..20: note = Description of Artificial Sequence: Synthetic oligonucleotide
  misc_feature 1..20: note = Target: ANGPTL3; (+) strand; PAM type: NRG; PAM sequence: TAG
  source 1..20: mol_type = other DNA
gacattaattcaacatcgaa

SEQ ID NO: 9442 - DNA, 20 bp, synthetic construct
  misc_feature 1..20: note = Description of Artificial Sequence: Synthetic oligonucleotide
  misc_feature 1..20: note = Target: ANGPTL3; (+) strand; PAM type: NRG; PAM sequence: TGG
  source 1..20: mol_type = other DNA
ttaattcaacatcgaataga

SEQ ID NO: 9443 - DNA, 20 bp, synthetic construct
  misc_feature 1..20: note = Description of Artificial Sequence: Synthetic oligonucleotide
  misc_feature 1..20: note = Target: ANGPTL3; (+) strand; PAM type: NRG; PAM sequence: TGG
  source 1..20: mol_type = other DNA
cacaaaacttcaatgaaacg

SEQ ID NO: 9444 - DNA, 20 bp, synthetic construct
  misc_feature 1..20: note = Description of Artificial Sequence: Synthetic oligonucleotide
  misc_feature 1..20: note = Target: ANGPTL3; (+) strand; PAM type: NRG; PAM sequence: GGG
  source 1..20: mol_type = other DNA
acaaaacttcaatgaaacgt

SEQ ID NO: 9445 - DNA, 20 bp, synthetic construct
  misc_feature 1..20: note = Description of Artificial Sequence: Synthetic oligonucleotide
  misc_feature 1..20: note = Target: ANGPTL3; (+) strand; PAM type: NRG; PAM sequence: GAG
  source 1..20: mol_type = other DNA
aaaacttcaatgaaacgtgg

SEQ ID NO: 9446 - DNA, 20 bp, synthetic construct
  misc_feature 1..20: note = Description of Artificial Sequence: Synthetic oligonucleotide
  misc_feature 1..20: note = Target: ANGPTL3; (+) strand; PAM type: NRG; PAM sequence: TGG
  source 1..20: mol_type = other DNA
acgtgggagaactacaaata

SEQ ID NO: 9447 - DNA, 20 bp, synthetic construct
  misc_feature 1..20: note = Description of Artificial Sequence: Synthetic oligonucleotide
  misc_feature 1..20: note = Target: ANGPTL3; (+) strand; PAM type: NRG; PAM sequence: TGG
  source 1..20: mol_type = other DNA
gagaactacaaatatggttt

SEQ ID NO: 9448 - DNA, 20 bp, synthetic construct
  misc_feature 1..20: note = Description of Artificial Sequence: Synthetic oligonucleotide
  misc_feature 1..20: note = Target: ANGPTL3; (+) strand; PAM type: NRG; PAM sequence: GGG
  source 1..20: mol_type = other DNA
agaactacaaatatggtttt

SEQ ID NO: 9449 - DNA, 20 bp, synthetic construct
  misc_feature 1..20: note = Description of Artificial Sequence: Synthetic oligonucleotide
  misc_feature 1..20: note = Target: ANGPTL3; (+) strand; PAM type: NRG; PAM sequence: GAG
  source 1..20: mol_type = other DNA
aactacaaatatggttttgg

SEQ ID NO: 9450 - DNA, 20 bp, synthetic construct
  misc_feature 1..20: note = Description of Artificial Sequence: Synthetic oligonucleotide
  misc_feature 1..20: note = Target: ANGPTL3; (+) strand; PAM type: NRG; PAM sequence: AGG
  source 1..20: mol_type = other DNA
actacaaatatggttttggg

SEQ ID NO: 9451 - DNA, 20 bp, synthetic construct
  misc_feature 1..20: note = Description of Artificial Sequence: Synthetic oligonucleotide
  misc_feature 1..20: note = Target: ANGPTL3; (+) strand; PAM type: NRG; PAM sequence: TGG
  source 1..20: mol_type = other DNA
tatggttttgggaggcttga

SEQ ID NO: 9452 - DNA, 20 bp, synthetic construct
  misc_feature 1..20: note = Description of Artificial Sequence: Synthetic oligonucleotide
  misc_feature 1..20: note = Target: ANGPTL3; (+) strand; PAM type: NRG; PAM sequence: AAG
  source 1..20: mol_type = other DNA
gttttgggaggcttgatggt

SEQ ID NO: 9453 - DNA, 20 bp, synthetic construct
  misc_feature 1..20: note = Description of Artificial Sequence: Synthetic oligonucleotide
  misc_feature 1..20: note = Target: ANGPTL3; (+) strand; PAM type: NRG; PAM sequence: AGG
  source 1..20: mol_type = other DNA
ttttgggaggcttgatggta

SEQ ID NO: 9454 - DNA, 20 bp, synthetic construct
  misc_feature 1..20: note = Description of Artificial Sequence: Synthetic oligonucleotide
  misc_feature 1..20: note = Target: ANGPTL3; (+) strand; PAM type: NRG; PAM sequence: GGG
  source 1..20: mol_type = other DNA
tttgggaggcttgatggtaa

SEQ ID NO: 9455 - DNA, 20 bp, synthetic construct
  misc_feature 1..20: note = Description of Artificial Sequence: Synthetic oligonucleotide
  misc_feature 1..20: note = Target: ANGPTL3; (+) strand; PAM type: NRG; PAM sequence: GGG
  source 1..20: mol_type = other DNA
ttgggaggcttgatggtaag

SEQ ID NO: 9456 - DNA, 20 bp, synthetic construct
  misc_feature 1..20: note = Description of Artificial Sequence: Synthetic oligonucleotide
  misc_feature 1..20: note = Target: ANGPTL3; (+) strand; PAM type: NRG; PAM sequence: GAG
  source 1..20: mol_type = other DNA
ctaatctacaaatatttact

SEQ ID NO: 9457 - DNA, 20 bp, synthetic construct
  misc_feature 1..20: note = Description of Artificial Sequence: Synthetic oligonucleotide
  misc_feature 1..20: note = Target: ANGPTL3; (+) strand; PAM type: NRG; PAM sequence: TGG
  source 1..20: mol_type = other DNA
tatttactgagaacctctta

SEQ ID NO: 9458 - DNA, 20 bp, synthetic construct
  misc_feature 1..20: note = Description of Artificial Sequence: Synthetic oligonucleotide
  misc_feature 1..20: note = Target: ANGPTL3; (+) strand; PAM type: NRG; PAM sequence: CAG
  source 1..20: mol_type = other DNA
actgagaacctcttatggac

SEQ ID NO: 9459 - DNA, 20 bp, synthetic construct
  misc_feature 1..20: note = Description of Artificial Sequence: Synthetic oligonucleotide
  misc_feature 1..20: note = Target: ANGPTL3; (+) strand; PAM type: NRG; PAM sequence: AGG
  source 1..20: mol_type = other DNA
ctgagaacctcttatggacc

SEQ ID NO: 9460 - DNA, 20 bp, synthetic construct
  misc_feature 1..20: note = Description of Artificial Sequence: Synthetic oligonucleotide
  misc_feature 1..20: note = Target: ANGPTL3; (+) strand; PAM type: NRG; PAM sequence: TAG
  source 1..20: mol_type = other DNA
acctcttatggaccaggtat

SEQ ID NO: 9461 - DNA, 20 bp, synthetic construct
  misc_feature 1..20: note = Description of Artificial Sequence: Synthetic oligonucleotide
  misc_feature 1..20: note = Target: ANGPTL3; (+) strand; PAM type: NRG; PAM sequence: AGG
  source 1..20: mol_type = other DNA
cctcttatggaccaggtatt

SEQ ID NO: 9462 - DNA, 20 bp, synthetic construct
  misc_feature 1..20: note = Description of Artificial Sequence: Synthetic oligonucleotide
  misc_feature 1..20: note = Target: ANGPTL3; (+) strand; PAM type: NRG; PAM sequence: AAG
  source 1..20: mol_type = other DNA
tatggaccaggtattaggaa

SEQ ID NO: 9463 - DNA, 20 bp, synthetic construct
  misc_feature 1..20: note = Description of Artificial Sequence: Synthetic oligonucleotide
  misc_feature 1..20: note = Target: ANGPTL3; (+) strand; PAM type: NRG; PAM sequence: TAG
  source 1..20: mol_type = other DNA
ggaccaggtattaggaaaag

SEQ ID NO: 9464 - DNA, 20 bp, synthetic construct
  misc_feature 1..20: note = Description of Artificial Sequence: Synthetic oligonucleotide
  misc_feature 1..20: note = Target: ANGPTL3; (+) strand; PAM type: NRG; PAM sequence: GAG
  source 1..20: mol_type = other DNA
taggaaaagtagtaacgaac

SEQ ID NO: 9465 - DNA, 20 bp, synthetic construct
  misc_feature 1..20: note = Description of Artificial Sequence: Synthetic oligonucleotide
  misc_feature 1..20: note = Target: ANGPTL3; (+) strand; PAM type: NRG; PAM sequence: AAG
  source 1..20: mol_type = other DNA
gaaaagtagtaacgaacgag

SEQ ID NO: 9466 - DNA, 20 bp, synthetic construct
  misc_feature 1..20: note = Description of Artificial Sequence: Synthetic oligonucleotide
  misc_feature 1..20: note = Target: ANGPTL3; (+) strand; PAM type: NRG; PAM sequence: CAG
  source 1..20: mol_type = other DNA
aagtagtaacgaacgagaag

SEQ ID NO: 9467 - DNA, 20 bp, synthetic construct
  misc_feature 1..20: note = Description of Artificial Sequence: Synthetic oligonucleotide
  misc_feature 1..20: note = Target: ANGPTL3; (+) strand; PAM type: NRG; PAM sequence: CAG
  source 1..20: mol_type = other DNA
taacgaacgagaagcagtct

SEQ ID NO: 9468 - DNA, 20 bp, synthetic construct
  misc_feature 1..20: note = Description of Artificial Sequence: Synthetic oligonucleotide
  misc_feature 1..20: note = Target: ANGPTL3; (+) strand; PAM type: NRG; PAM sequence: TAG
  source 1..20: mol_type = other DNA
tcaaacaattacacatttgt

SEQ ID NO: 9469 - DNA, 20 bp, synthetic construct
  misc_feature 1..20: note = Description of Artificial Sequence: Synthetic oligonucleotide
  misc_feature 1..20: note = Target: ANGPTL3; (+) strand; PAM type: NRG; PAM sequence: CGG
  source 1..20: mol_type = other DNA
cttatcacaatttaattcca

SEQ ID NO: 9470 - DNA, 20 bp, synthetic construct
  misc_feature 1..20: note = Description of Artificial Sequence: Synthetic oligonucleotide
  misc_feature 1..20: note = Target: ANGPTL3; (+) strand; PAM type: NRG; PAM sequence: AAG
  source 1..20: mol_type = other DNA
gatcataactataattatta

SEQ ID NO: 9471 - DNA, 20 bp, synthetic construct
  misc_feature 1..20: note = Description of Artificial Sequence: Synthetic oligonucleotide
  misc_feature 1..20: note = Target: ANGPTL3; (+) strand; PAM type: NRG; PAM sequence: AAG
  source 1..20: mol_type = other DNA
ttgattaaatgttatgtcat

SEQ ID NO: 9472 - DNA, 20 bp, synthetic construct
  misc_feature 1..20: note = Description of Artificial Sequence: Synthetic oligonucleotide
  misc_feature 1..20: note = Target: ANGPTL3; (+) strand; PAM type: NRG; PAM sequence: TAG
  source 1..20: mol_type = other DNA
attaaatgttatgtcataag

SEQ ID NO: 9473 - DNA, 20 bp, synthetic construct
  misc_feature 1..20: note = Description of Artificial Sequence: Synthetic oligonucleotide
  misc_feature 1..20: note = Target: ANGPTL3; (+) strand; PAM type: NRG; PAM sequence: AAG
  source 1..20: mol_type = other DNA
aagtagtaactgttacaaat

SEQ ID NO: 9474 - DNA, 20 bp, synthetic construct
  misc_feature 1..20: note = Description of Artificial Sequence: Synthetic oligonucleotide
  misc_feature 1..20: note = Target: ANGPTL3; (+) strand; PAM type: NRG; PAM sequence: AAG
  source 1..20: mol_type = other DNA
tgttacaaataagctgtgaa

SEQ ID NO: 9475 - DNA, 20 bp, synthetic construct
  misc_feature 1..20: note = Description of Artificial Sequence: Synthetic oligonucleotide
  misc_feature 1..20: note = Target: ANGPTL3; (+) strand; PAM type: NRG; PAM sequence: TAG
  source 1..20: mol_type = other DNA
gctgtgaaaagaaccactcc

SEQ ID NO: 9476 - DNA, 20 bp, synthetic construct
  misc_feature 1..20: note = Description of Artificial Sequence: Synthetic oligonucleotide
  misc_feature 1..20: note = Target: ANGPTL3; (+) strand; PAM type: NRG; PAM sequence: TAG
  source 1..20: mol_type = other DNA
aaaagaaccactcctagcat

SEQ ID NO: 9477 - DNA, 20 bp, synthetic construct
  misc_feature 1..20: note = Description of Artificial Sequence: Synthetic oligonucleotide
  misc_feature 1..20: note = Target: ANGPTL3; (+) strand; PAM type: NRG; PAM sequence: TGG
  source 1..20: mol_type = other DNA
cgttttacatatcaattaat

SEQ ID NO: 9478 - DNA, 20 bp, synthetic construct
  misc_feature 1..20: note = Description of Artificial Sequence: Synthetic oligonucleotide
  misc_feature 1..20: note = Target: ANGPTL3; (+) strand; PAM type: NRG; PAM sequence: AAG
  source 1..20: mol_type = other DNA
tttacatatcaattaattgg

SEQ ID NO: 9479 - DNA, 20 bp, synthetic construct
  misc_feature 1..20: note = Description of Artificial Sequence: Synthetic oligonucleotide
  misc_feature 1..20: note = Target: ANGPTL3; (+) strand; PAM type: NRG; PAM sequence: AAG
  source 1..20: mol_type = other DNA
atcaattaattggaagttaa

SEQ ID NO: 9480 - DNA, 20 bp, synthetic construct
  misc_feature 1..20: note = Description of Artificial Sequence: Synthetic oligonucleotide
  misc_feature 1..20: note = Target: ANGPTL3; (+) strand; PAM type: NRG; PAM sequence: AGG
  source 1..20: mol_type = other DNA
tcaattaattggaagttaaa

SEQ ID NO: 9481 - DNA, 20 bp, synthetic construct
  misc_feature 1..20: note = Description of Artificial Sequence: Synthetic oligonucleotide
  misc_feature 1..20: note = Target: ANGPTL3; (+) strand; PAM type: NRG; PAM sequence: CAG
  source 1..20: mol_type = other DNA
taattggaagttaaaaggac

SEQ ID NO: 9482 - DNA, 20 bp, synthetic construct
  misc_feature 1..20: note = Description of Artificial Sequence: Synthetic oligonucleotide
  misc_feature 1..20: note = Target: ANGPTL3; (+) strand; PAM type: NRG; PAM sequence: AGG
  source 1..20: mol_type = other DNA
aattggaagttaaaaggacc

SEQ ID NO: 9483 - DNA, 20 bp, synthetic construct
  misc_feature 1..20: note = Description of Artificial Sequence: Synthetic oligonucleotide
  misc_feature 1..20: note = Target: ANGPTL3; (+) strand; PAM type: NRG; PAM sequence: CAG
  source 1..20: mol_type = other DNA
gttaaaaggaccaggaaact

SEQ ID NO: 9484 - DNA, 20 bp, synthetic construct
  misc_feature 1..20: note = Description of Artificial Sequence: Synthetic oligonucleotide
  misc_feature 1..20: note = Target: ANGPTL3; (+) strand; PAM type: NRG; PAM sequence: CAG
  source 1..20: mol_type = other DNA
gaccaggaaactcagacata

SEQ ID NO: 9485 - DNA, 20 bp, synthetic construct
  misc_feature 1..20: note = Description of Artificial Sequence: Synthetic oligonucleotide
  misc_feature 1..20: note = Target: ANGPTL3; (+) strand; PAM type: NRG; PAM sequence: TAG
  source 1..20: mol_type = other DNA
aattatttaaatataatata

SEQ ID NO: 9486 - DNA, 20 bp, synthetic construct
  misc_feature 1..20: note = Description of Artificial Sequence: Synthetic oligonucleotide
  misc_feature 1..20: note = Target: ANGPTL3; (+) strand; PAM type: NRG; PAM sequence: TGG
  source 1..20: mol_type = other DNA
aatataatatatagaatgta

SEQ ID NO: 9487 - DNA, 20 bp, synthetic construct
  misc_feature 1..20: note = Description of Artificial Sequence: Synthetic oligonucleotide
  misc_feature 1..20: note = Target: ANGPTL3; (+) strand; PAM type: NRG; PAM sequence: TAG
  source 1..20: mol_type = other DNA
atgtatggcttataatgaat

SEQ ID NO: 9488 - DNA, 20 bp, synthetic construct
  misc_feature 1..20: note = Description of Artificial Sequence: Synthetic oligonucleotide
  misc_feature 1..20: note = Target: ANGPTL3; (+) strand; PAM type: NRG; PAM sequence: TAG
  source 1..20: mol_type = other DNA
tattctattttgattacaaa

SEQ ID NO: 9489 - DNA, 20 bp, synthetic construct
  misc_feature 1..20: note = Description of Artificial Sequence: Synthetic oligonucleotide
  misc_feature 1..20: note = Target: ANGPTL3; (+) strand; PAM type: NRG; PAM sequence: AAG
  source 1..20: mol_type = other DNA
ttgattacaaatagtaaaat

SEQ ID NO: 9490 - DNA, 20 bp, synthetic construct
  misc_feature 1..20: note = Description of Artificial Sequence: Synthetic oligonucleotide
  misc_feature 1..20: note = Target: ANGPTL3; (+) strand; PAM type: NRG; PAM sequence: AAG
  source 1..20: mol_type = other DNA
ttacaaatagtaaaataagc

SEQ ID NO: 9491 - DNA, 20 bp, synthetic construct
  misc_feature 1..20: note = Description of Artificial Sequence: Synthetic oligonucleotide
  misc_feature 1..20: note = Target: ANGPTL3; (+) strand; PAM type: NRG; PAM sequence: CAG
  source 1..20: mol_type = other DNA
aaataagcaagataaaataa

SEQ ID NO: 9492 - DNA, 20 bp, synthetic construct
  misc_feature 1..20: note = Description of Artificial Sequence: Synthetic oligonucleotide
  misc_feature 1..20: note = Target: ANGPTL3; (+) strand; PAM type: NRG; PAM sequence: AAG
  source 1..20: mol_type = other DNA
acagatgtttaaaatccaaa

SEQ ID NO: 9493 - DNA, 20 bp, synthetic construct
  misc_feature 1..20: note = Description of Artificial Sequence: Synthetic oligonucleotide
  misc_feature 1..20: note = Target: ANGPTL3; (+) strand; PAM type: NRG; PAM sequence: AAG
  source 1..20: mol_type = other DNA
aaaatccatgaatgatgtct

SEQ ID NO: 9494 - DNA, 20 bp, synthetic construct
  misc_feature 1..20: note = Description of Artificial Sequence: Synthetic oligonucleotide
  misc_feature 1..20: note = Target: ANGPTL3; (+) strand; PAM type: NRG; PAM sequence: AAG
  source 1..20: mol_type = other DNA
tgtctaagtactcacttata

SEQ ID NO: 9495 - DNA, 20 bp, synthetic construct
  misc_feature 1..20: note = Description of Artificial Sequence: Synthetic oligonucleotide
  misc_feature 1..20: note = Target: ANGPTL3; (+) strand; PAM type: NRG; PAM sequence: TAG
  source 1..20: mol_type = other DNA
ctaagtactcacttataaag

SEQ ID NO: 9496 - DNA, 20 bp, synthetic construct
  misc_feature 1..20: note = Description of Artificial Sequence: Synthetic oligonucleotide
  misc_feature 1..20: note = Target: ANGPTL3; (+) strand; PAM type: NRG; PAM sequence: AAG
  source 1..20: mol_type = other DNA
agtactcacttataaagtag

SEQ ID NO: 9497 - DNA, 20 bp, synthetic construct
  misc_feature 1..20: note = Description of Artificial Sequence: Synthetic oligonucleotide
  misc_feature 1..20: note = Target: ANGPTL3; (+) strand; PAM type: NRG; PAM sequence: CAG
  source 1..20: mol_type = other DNA
atatcaaatttttaaatgct

SEQ ID NO: 9498 - DNA, 20 bp, synthetic construct
  misc_feature 1..20: note = Description of Artificial Sequence: Synthetic oligonucleotide
  misc_feature 1..20: note = Target: ANGPTL3; (+) strand; PAM type: NRG; PAM sequence: CAG
  source 1..20: mol_type = other DNA
aaattttgtattcaaactac

SEQ ID NO: 9499 - DNA, 20 bp, synthetic construct
  misc_feature 1..20: note = Description of Artificial Sequence: Synthetic oligonucleotide
  misc_feature 1..20: note = Target: ANGPTL3; (+) strand; PAM type: NRG; PAM sequence: AAG
  source 1..20: mol_type = other DNA
tgtattcaaactaccagtga

SEQ ID NO: 9500 - DNA, 20 bp, synthetic construct
  misc_feature 1..20: note = Description of Artificial Sequence: Synthetic oligonucleotide
  misc_feature 1..20: note = Target: ANGPTL3; (+) strand; PAM type: NRG; PAM sequence: TAG
  source 1..20: mol_type = other DNA
ctaccagtgaaagccctacc

SEQ ID NO: 9501 - DNA, 20 bp, synthetic construct
  misc_feature 1..20: note = Description of Artificial Sequence: Synthetic oligonucleotide
  misc_feature 1..20: note = Target: ANGPTL3; (+) strand; PAM type: NRG; PAM sequence: AAG
  source 1..20: mol_type = other DNA
ccagtgaaagccctacctag

SEQ ID NO: 9502 - DNA, 20 bp, synthetic construct
  misc_feature 1..20: note = Description of Artificial Sequence: Synthetic oligonucleotide
  misc_feature 1..20: note = Target: ANGPTL3; (+) strand; PAM type: NRG; PAM sequence: AGG
  source 1..20: mol_type = other DNA
cagtgaaagccctacctaga

SEQ ID NO: 9503 - DNA, 20 bp, synthetic construct
  misc_feature 1..20: note = Description of Artificial Sequence: Synthetic oligonucleotide
  misc_feature 1..20: note = Target: ANGPTL3; (+) strand; PAM type: NRG; PAM sequence: CAG
  source 1..20: mol_type = other DNA
ccctacctagaaggtatact

SEQ ID NO: 9504 - DNA, 20 bp, synthetic construct
  misc_feature 1..20: note = Description of Artificial Sequence: Synthetic oligonucleotide
  misc_feature 1..20: note = Target: ANGPTL3; (+) strand; PAM type: NRG; PAM sequence: AAG
  source 1..20: mol_type = other DNA
tagaaggtatactcagtgat

SEQ ID NO: 9505 - DNA, 20 bp, synthetic construct
  misc_feature 1..20: note = Description of Artificial Sequence: Synthetic oligonucleotide
  misc_feature 1..20: note = Target: ANGPTL3; (+) strand; PAM type: NRG; PAM sequence: TAG
  source 1..20: mol_type = other DNA
atactcagtgataagttttg

SEQ ID NO: 9506 - DNA, 20 bp, synthetic construct
  misc_feature 1..20: note = Description of Artificial Sequence: Synthetic oligonucleotide
  misc_feature 1..20: note = Target: ANGPTL3; (+) strand; PAM type: NRG; PAM sequence: TAG
  source 1..20: mol_type = other DNA
tgtagctccaaatcttctaa

SEQ ID NO: 9507 - DNA, 20 bp, synthetic construct
  misc_feature 1..20: note = Description of Artificial Sequence: Synthetic oligonucleotide
  misc_feature 1..20: note = Target: ANGPTL3; (+) strand; PAM type: NRG; PAM sequence: GAG
  source 1..20: mol_type = other DNA
gctccaaatcttctaatagt

SEQ ID NO: 9508 - DNA, 20 bp, synthetic construct
  misc_feature 1..20: note = Description of Artificial Sequence: Synthetic oligonucleotide
  misc_feature 1..20: note = Target: ANGPTL3; (+) strand; PAM type: NRG; PAM sequence: AAG
  source 1..20: mol_type = other DNA
tgagtgtaaccccaaaataa

SEQ ID NO: 9509 - DNA, 20 bp, synthetic construct
  misc_feature 1..20: note = Description of Artificial Sequence: Synthetic oligonucleotide
  misc_feature 1..20: note = Target: ANGPTL3; (+) strand; PAM type: NRG; PAM sequence: AGG
  source 1..20: mol_type = other DNA
gagtgtaaccccaaaataaa

SEQ ID NO: 9510 - DNA, 20 bp, synthetic construct
  misc_feature 1..20: note = Description of Artificial Sequence: Synthetic oligonucleotide
  misc_feature 1..20: note = Target: ANGPTL3; (+) strand; PAM type: NRG; PAM sequence: CAG
  source 1..20: mol_type = other DNA
accccaaaataaaaggctga

SEQ ID NO: 9511 - DNA, 20 bp, synthetic construct
  misc_feature 1..20: note = Description of Artificial Sequence: Synthetic oligonucleotide
  misc_feature 1..20: note = Target: ANGPTL3; (+) strand; PAM type: NRG; PAM sequence: AGG
  source 1..20: mol_type = other DNA
ccccaaaataaaaggctgac

SEQ ID NO: 9512 - DNA, 20 bp, synthetic construct
  misc_feature 1..20: note = Description of Artificial Sequence: Synthetic oligonucleotide
  misc_feature 1..20: note = Target: ANGPTL3; (+) strand; PAM type: NRG; PAM sequence: AAG
  source 1..20: mol_type = other DNA
aaaataaaaggctgacaggt

SEQ ID NO: 9513 - DNA, 20 bp, synthetic construct
  misc_feature 1..20: note = Description of Artificial Sequence: Synthetic oligonucleotide
  misc_feature 1..20: note = Target: ANGPTL3; (+) strand; PAM type: NRG; PAM sequence: GAG
  source 1..20: mol_type = other DNA
aaaaggctgacaggtaagtc

SEQ ID NO: 9514 - DNA, 20 bp, synthetic construct
  misc_feature 1..20: note = Description of Artificial Sequence: Synthetic oligonucleotide
  misc_feature 1..20: note = Target: ANGPTL3; (+) strand; PAM type: NRG; PAM sequence: TGG
  source 1..20: mol_type = other DNA
cgagaatactcacttaattc

SEQ ID NO: 9515 - DNA, 20 bp, synthetic construct
  misc_feature 1..20: note = Description of Artificial Sequence: Synthetic oligonucleotide
  misc_feature 1..20: note = Target: ANGPTL3; (+) strand; PAM type: NRG; PAM sequence: AAG
  source 1..20: mol_type = other DNA
aatactcacttaattctggt

SEQ ID NO: 9516 - DNA, 20 bp, synthetic construct
  misc_feature 1..20: note = Description of Artificial Sequence: Synthetic oligonucleotide
  misc_feature 1..20: note = Target: ANGPTL3; (+) strand; PAM type: NRG; PAM sequence: AAG
  source 1..20: mol_type = other DNA
ctcacttaattctggtaaga

SEQ ID NO: 9517 - DNA, 20 bp, synthetic construct
  misc_feature 1..20: note = Description of Artificial Sequence: Synthetic oligonucleotide
  misc_feature 1..20: note = Target: ANGPTL3; (+) strand; PAM type: NRG; PAM sequence: CAG
  source 1..20: mol_type = other DNA
ccatttgtacttgtatttac

SEQ ID NO: 9518 - DNA, 20 bp, synthetic construct
  misc_feature 1..20: note = Description of Artificial Sequence: Synthetic oligonucleotide
  misc_feature 1..20: note = Target: ANGPTL3; (+) strand; PAM type: NRG; PAM sequence: AAG
  source 1..20: mol_type = other DNA
taccagcaatccttaaaatg

SEQ ID NO: 9519 - DNA, 20 bp, synthetic construct
  misc_feature 1..20: note = Description of Artificial Sequence: Synthetic oligonucleotide
  misc_feature 1..20: note = Target: ANGPTL3; (+) strand; PAM type: NRG; PAM sequence: TAG
  source 1..20: mol_type = other DNA
gaagcttcctactaactcaa

SEQ ID NO: 9520 - DNA, 20 bp, synthetic construct
  misc_feature 1..20: note = Description of Artificial Sequence: Synthetic oligonucleotide
  misc_feature 1..20: note = Target: ANGPTL3; (+) strand; PAM type: NRG; PAM sequence: AAG
  source 1..20: mol_type = other DNA
cctactaactcaatagcaat

SEQ ID NO: 9521 - DNA, 20 bp, synthetic construct
  misc_feature 1..20: note = Description of Artificial Sequence: Synthetic oligonucleotide
  misc_feature 1..20: note = Target: ANGPTL3; (+) strand; PAM type: NRG; PAM sequence: TAG
  source 1..20: mol_type = other DNA
actcaatagcaataagacaa

SEQ ID NO: 9522 - DNA, 20 bp, synthetic construct
  misc_feature 1..20: note = Description of Artificial Sequence: Synthetic oligonucleotide
  misc_feature 1..20: note = Target: ANGPTL3; (+) strand; PAM type: NRG; PAM sequence: CAG
  source 1..20: mol_type = other DNA
tagtgaatgtttaatgaaaa

SEQ ID NO: 9523 - DNA, 20 bp, synthetic construct
  misc_feature 1..20: note = Description of Artificial Sequence: Synthetic oligonucleotide
  misc_feature 1..20: note = Target: ANGPTL3; (+) strand; PAM type: NRG; PAM sequence: AAG
  source 1..20: mol_type = other DNA
tttataaatactttaataaa

SEQ ID NO: 9524 - DNA, 20 bp, synthetic construct
  misc_feature 1..20: note = Description of Artificial Sequence: Synthetic oligonucleotide
  misc_feature 1..20: note = Target: ANGPTL3; (+) strand; PAM type: NRG; PAM sequence: AGG
  source 1..20: mol_type = other DNA
ttataaatactttaataaaa

SEQ ID NO: 9525 - DNA, 20 bp, synthetic construct
  misc_feature 1..20: note = Description of Artificial Sequence: Synthetic oligonucleotide
  misc_feature 1..20: note = Target: ANGPTL3; (+) strand; PAM type: NRG; PAM sequence: AAG
  source 1..20: mol_type = other DNA
taataaaaaggattgtgatg

SEQ ID NO: 9526 - DNA, 20 bp, synthetic construct
  misc_feature 1..20: note = Description of Artificial Sequence: Synthetic oligonucleotide
  misc_feature 1..20: note = Target: ANGPTL3; (+) strand; PAM type: NRG; PAM sequence: CAG
  source 1..20: mol_type = other DNA
aaaaataatttttaaaatta

SEQ ID NO: 9527 - DNA, 20 bp, synthetic construct
  misc_feature 1..20: note = Description of Artificial Sequence: Synthetic oligonucleotide
  misc_feature 1..20: note = Target: ANGPTL3; (+) strand; PAM type: NRG; PAM sequence: AAG
  source 1..20: mol_type = other DNA
atttttaaaattacagaaaa

SEQ ID NO: 9528 - DNA, 20 bp, synthetic construct
  misc_feature 1..20: note = Description of Artificial Sequence: Synthetic oligonucleotide
  misc_feature 1..20: note = Target: ANGPTL3; (+) strand; PAM type: NRG; PAM sequence: AAG
  source 1..20: mol_type = other DNA
aattacagaaaaaagttatt

SEQ ID NO: 9529 - DNA, 20 bp, synthetic construct
  misc_feature 1..20: note = Description of Artificial Sequence: Synthetic oligonucleotide
  misc_feature 1..20: note = Target: ANGPTL3; (+) strand; PAM type: NRG; PAM sequence: AAG
  source 1..20: mol_type = other DNA
tattcctgtctttttctaca

SEQ ID NO: 9530 - DNA, 20 bp, synthetic construct
  misc_feature 1..20: note = Description of Artificial Sequence: Synthetic oligonucleotide
  misc_feature 1..20: note = Target: ANGPTL3; (+) strand; PAM type: NRG; PAM sequence: AAG
  source 1..20: mol_type = other DNA
cctgtctttttctacaaaga

SEQ ID NO: 9531 - DNA, 20 bp, synthetic construct
  misc_feature 1..20: note = Description of Artificial Sequence: Synthetic oligonucleotide
  misc_feature 1..20: note = Target: ANGPTL3; (+) strand; PAM type: NRG; PAM sequence: AAG
  source 1..20: mol_type = other DNA
ctacaaagaaagcatacatt

SEQ ID NO: 9532 - DNA, 20 bp, synthetic construct
  misc_feature 1..20: note = Description of Artificial Sequence: Synthetic oligonucleotide
  misc_feature 1..20: note = Target: ANGPTL3; (+) strand; PAM type: NRG; PAM sequence: AAG
  source 1..20: mol_type = other DNA
catacattaagcaaatacca

SEQ ID NO: 9533 - DNA, 20 bp, synthetic construct
  misc_feature 1..20: note = Description of Artificial Sequence: Synthetic oligonucleotide
  misc_feature 1..20: note = Target: ANGPTL3; (+) strand; PAM type: NRG; PAM sequence: AGG
  source 1..20: mol_type = other DNA
atacattaagcaaataccaa

SEQ ID NO: 9534 - DNA, 20 bp, synthetic construct
  misc_feature 1..20: note = Description of Artificial Sequence: Synthetic oligonucleotide
  misc_feature 1..20: note = Target: ANGPTL3; (+) strand; PAM type: NRG; PAM sequence: CAG
  source 1..20: mol_type = other DNA
attaagcaaataccaaaggc

SEQ ID NO: 9535 - DNA, 20 bp, synthetic construct
  misc_feature 1..20: note = Description of Artificial Sequence: Synthetic oligonucleotide
  misc_feature 1..20: note = Target: ANGPTL3; (+) strand; PAM type: NRG; PAM sequence: AGG
  source 1..20: mol_type = other DNA
ttaagcaaataccaaaggcc

SEQ ID NO: 9536 - DNA, 20 bp, synthetic construct
  misc_feature 1..20: note = Description of Artificial Sequence: Synthetic oligonucleotide
  misc_feature 1..20: note = Target: ANGPTL3; (+) strand; PAM type: NRG; PAM sequence: AAG
  source 1..20: mol_type = other DNA
aaaggccaggtttacatttg

SEQ ID NO: 9537 - DNA, 20 bp, synthetic construct
  misc_feature 1..20: note = Description of Artificial Sequence: Synthetic oligonucleotide
  misc_feature 1..20: note = Target: ANGPTL3; (+) strand; PAM type: NRG; PAM sequence: AAG
  source 1..20: mol_type = other DNA
gccaggtttacatttgaaga

SEQ ID NO: 9538 - DNA, 20 bp, synthetic construct
  misc_feature 1..20: note = Description of Artificial Sequence: Synthetic oligonucleotide
  misc_feature 1..20: note = Target: ANGPTL3; (+) strand; PAM type: NRG; PAM sequence: AAG
  source 1..20: mol_type = other DNA
aagtgacattattattactc

SEQ ID NO: 9539 - DNA, 20 bp, synthetic construct
  misc_feature 1..20: note = Description of Artificial Sequence: Synthetic oligonucleotide
  misc_feature 1..20: note = Target: ANGPTL3; (+) strand; PAM type: NRG; PAM sequence: TAG
  source 1..20: mol_type = other DNA
attattattactcaagtctc

SEQ ID NO: 9540 - DNA, 20 bp, synthetic construct
  misc_feature 1..20: note = Description of Artificial Sequence: Synthetic oligonucleotide
  misc_feature 1..20: note = Target: ANGPTL3; (+) strand; PAM type: NRG; PAM sequence: AGG
  source 1..20: mol_type = other DNA
ttattattactcaagtctct

SEQ ID NO: 9541 - DNA, 20 bp, synthetic construct
  misc_feature 1..20: note = Description of Artificial Sequence: Synthetic oligonucleotide
  misc_feature 1..20: note = Target: ANGPTL3; (+) strand; PAM type: NRG; PAM sequence: TGG
  source 1..20: mol_type = other DNA
acacatctcttgactgtata

SEQ ID NO: 9542 - DNA, 20 bp, synthetic construct
  misc_feature 1..20: note = Description of Artificial Sequence: Synthetic oligonucleotide
  misc_feature 1..20: note = Target: ANGPTL3; (+) strand; PAM type: NRG; PAM sequence: TAG
  source 1..20: mol_type = other DNA
tgtatatggatgttaataaa

SEQ ID NO: 9543 - DNA, 20 bp, synthetic construct
  misc_feature 1..20: note = Description of Artificial Sequence: Synthetic oligonucleotide
  misc_feature 1..20: note = Target: ANGPTL3; (+) strand; PAM type: NRG; PAM sequence: CAG
  source 1..20: mol_type = other DNA
ggatgttaataaatagctga

SEQ ID NO: 9544 - DNA, 20 bp, synthetic construct
  misc_feature 1..20: note = Description of Artificial Sequence: Synthetic oligonucleotide
  misc_feature 1..20: note = Target: ANGPTL3; (+) strand; PAM type: NRG; PAM sequence: AAG
  source 1..20: mol_type = other DNA
ttaataaatagctgacagta

SEQ ID NO: 9545 - DNA, 20 bp, synthetic construct
  misc_feature 1..20: note = Description of Artificial Sequence: Synthetic oligonucleotide
  misc_feature 1..20: note = Target: ANGPTL3; (+) strand; PAM type: NRG; PAM sequence: AAG
  source 1..20: mol_type = other DNA
cagtaaagtttatccatata

SEQ ID NO: 9546 - DNA, 20 bp, synthetic construct
  misc_feature 1..20: note = Description of Artificial Sequence: Synthetic oligonucleotide
  misc_feature 1..20: note = Target: ANGPTL3; (+) strand; PAM type: NRG; PAM sequence: GAG
  source 1..20: mol_type = other DNA
aatattcctctaccaatgac

SEQ ID NO: 9547 - DNA, 20 bp, synthetic construct
  misc_feature 1..20: note = Description of Artificial Sequence: Synthetic oligonucleotide
  misc_feature 1..20: note = Target: ANGPTL3; (+) strand; PAM type: NRG; PAM sequence: TGG
  source 1..20: mol_type = other DNA
aataatgtaacacatttcac

SEQ ID NO: 9548 - DNA, 20 bp, synthetic construct
  misc_feature 1..20: note = Description of Artificial Sequence: Synthetic oligonucleotide
  misc_feature 1..20: note = Target: ANGPTL3; (+) strand; PAM type: NRG; PAM sequence: TAG
  source 1..20: mol_type = other DNA
atgtcttgtcatatgcatta

SEQ ID NO: 9549 - DNA, 20 bp, synthetic construct
  misc_feature 1..20: note = Description of Artificial Sequence: Synthetic oligonucleotide
  misc_feature 1..20: note = Target: ANGPTL3; (+) strand; PAM type: NRG; PAM sequence: AAG
  source 1..20: mol_type = other DNA
cttgtcatatgcattataga

SEQ ID NO: 9550 - DNA, 20 bp, synthetic construct
  misc_feature 1..20: note = Description of Artificial Sequence: Synthetic oligonucleotide
  misc_feature 1..20: note = Target: ANGPTL3; (+) strand; PAM type: NRG; PAM sequence: AGG
  source 1..20: mol_type = other DNA
ttgtcatatgcattatagaa

SEQ ID NO: 9551 - DNA, 20 bp, synthetic construct
  misc_feature 1..20: note = Description of Artificial Sequence: Synthetic oligonucleotide
  misc_feature 1..20: note = Target: ANGPTL3; (+) strand; PAM type: NRG; PAM sequence: CAG
  source 1..20: mol_type = other DNA
tgcattatagaaaggataat

SEQ ID NO: 9552 - DNA, 20 bp, synthetic construct
  misc_feature 1..20: note = Description of Artificial Sequence: Synthetic oligonucleotide
  misc_feature 1..20: note = Target: ANGPTL3; (+) strand; PAM type: NRG; PAM sequence: CAG
  source 1..20: mol_type = other DNA
agaaaggataatcagacttt

SEQ ID NO: 9553 - DNA, 20 bp, synthetic construct
  misc_feature 1..20: note = Description of Artificial Sequence: Synthetic oligonucleotide
  misc_feature 1..20: note = Target: ANGPTL3; (+) strand; PAM type: NRG; PAM sequence: TAG
  source 1..20: mol_type = other DNA
ttttaacatttttgtgcaca

SEQ ID NO: 9554 - DNA, 20 bp, synthetic construct
  misc_feature 1..20: note = Description of Artificial Sequence: Synthetic oligonucleotide
  misc_feature 1..20: note = Target: ANGPTL3; (+) strand; PAM type: NRG; PAM sequence: AAG
  source 1..20: mol_type = other DNA
cttcaataaaattgttttaa

SEQ ID NO: 9555 - DNA, 20 bp, synthetic construct
  misc_feature 1..20: note = Description of Artificial Sequence: Synthetic oligonucleotide
  misc_feature 1..20: note = Target: ANGPTL3; (+) strand; PAM type: NRG; PAM sequence: AGG
  source 1..20: mol_type = other DNA
ttcaataaaattgttttaaa

SEQ ID NO: 9556 - DNA, 20 bp, synthetic construct
  misc_feature 1..20: note = Description of Artificial Sequence: Synthetic oligonucleotide
  misc_feature 1..20: note = Target: ANGPTL3; (+) strand; PAM type: NRG; PAM sequence: AAG
  source 1..20: mol_type = other DNA
gttttaaaaggtattatttt

SEQ ID NO: 9557 - DNA, 20 bp, synthetic construct
  misc_feature 1..20: note = Description of Artificial Sequence: Synthetic oligonucleotide
  misc_feature 1..20: note = Target: ANGPTL3; (+) strand; PAM type: NRG; PAM sequence: AAG
  source 1..20: mol_type = other DNA
taagatacactaaaatgatc

SEQ ID NO: 9558 - DNA, 20 bp, synthetic construct
  misc_feature 1..20: note = Description of Artificial Sequence: Synthetic oligonucleotide
  misc_feature 1..20: note = Target: ANGPTL3; (+) strand; PAM type: NRG; PAM sequence: AGG
  source 1..20: mol_type = other DNA
aagatacactaaaatgatca

SEQ ID NO: 9559 - DNA, 20 bp, synthetic construct
  misc_feature 1..20: note = Description of Artificial Sequence: Synthetic oligonucleotide
  misc_feature 1..20: note = Target: ANGPTL3; (+) strand; PAM type: NRG; PAM sequence: GGG
  source 1..20: mol_type = other DNA
agatacactaaaatgatcaa

SEQ ID NO: 9560 - DNA, 20 bp, synthetic construct
  misc_feature 1..20: note = Description of Artificial Sequence: Synthetic oligonucleotide
  misc_feature 1..20: note = Target: ANGPTL3; (+) strand; PAM type: NRG; PAM sequence: AAG
  source 1..20: mol_type = other DNA
ctaaaatgatcaagggattc

SEQ ID NO: 9561 - DNA, 20 bp, synthetic construct
  misc_feature 1..20: note = Description of Artificial Sequence: Synthetic oligonucleotide
  misc_feature 1..20: note = Target: ANGPTL3; (+) strand; PAM type: NRG; PAM sequence: TAG
  source 1..20: mol_type = other DNA
tcaagactaaacaactcaat

SEQ ID NO: 9562 - DNA, 20 bp, synthetic construct
  misc_feature 1..20: note = Description of Artificial Sequence: Synthetic oligonucleotide
  misc_feature 1..20: note = Target: ANGPTL3; (+) strand; PAM type: NRG; PAM sequence: CAG
  source 1..20: mol_type = other DNA
aaaacacttaaaaaaactgt

SEQ ID NO: 9563 - DNA, 20 bp, synthetic construct
  misc_feature 1..20: note = Description of Artificial Sequence: Synthetic oligonucleotide
  misc_feature 1..20: note = Target: ANGPTL3; (+) strand; PAM type: NRG; PAM sequence: CAG
  source 1..20: mol_type = other DNA
aacctgtacttaataactca

SEQ ID NO: 9564 - DNA, 20 bp, synthetic construct
  misc_feature 1..20: note = Description of Artificial Sequence: Synthetic oligonucleotide
  misc_feature 1..20: note = Target: ANGPTL3; (+) strand; PAM type: NRG; PAM sequence: CAG
  source 1..20: mol_type = other DNA
atttttaaaacttttctttt

SEQ ID NO: 9565 - DNA, 20 bp, synthetic construct
  misc_feature 1..20: note = Description of Artificial Sequence: Synthetic oligonucleotide
  misc_feature 1..20: note = Target: ANGPTL3; (+) strand; PAM type: NRG; PAM sequence: AGG
  source 1..20: mol_type = other DNA
tttttaaaacttttcttttc

SEQ ID NO: 9566 - DNA, 20 bp, synthetic construct
  misc_feature 1..20: note = Description of Artificial Sequence: Synthetic oligonucleotide
  misc_feature 1..20: note = Target: ANGPTL3; (+) strand; PAM type: NRG; PAM sequence: GAG
  source 1..20: mol_type = other DNA
tttaaaacttttcttttcag

SEQ ID NO: 9567 - DNA, 20 bp, synthetic construct
  misc_feature 1..20: note = Description of Artificial Sequence: Synthetic oligonucleotide
  misc_feature 1..20: note = Target: ANGPTL3; (+) strand; PAM type: NRG; PAM sequence: TGG
  source 1..20: mol_type = other DNA
ttttcttttcaggagaattt

SEQ ID NO: 9568 - DNA, 20 bp, synthetic construct
  misc_feature 1..20: note = Description of Artificial Sequence: Synthetic oligonucleotide
  misc_feature 1..20: note = Target: ANGPTL3; (+) strand; PAM type: NRG; PAM sequence: TGG
  source 1..20: mol_type = other DNA
cttttcaggagaattttggt

SEQ ID NO: 9569 - DNA, 20 bp, synthetic construct
  misc_feature 1..20: note = Description of Artificial Sequence: Synthetic oligonucleotide
  misc_feature 1..20: note = Target: ANGPTL3; (+) strand; PAM type: NRG; PAM sequence: GGG
  source 1..20: mol_type = other DNA
ttttcaggagaattttggtt

SEQ ID NO: 9570 - DNA, 20 bp, synthetic construct
  misc_feature 1..20: note = Description of Artificial Sequence: Synthetic oligonucleotide
  misc_feature 1..20: note = Target: ANGPTL3; (+) strand; PAM type: NRG; PAM sequence: TAG
  source 1..20: mol_type = other DNA
aggagaattttggttgggcc

SEQ ID NO: 9571 - DNA, 20 bp, synthetic construct
  misc_feature 1..20: note = Description of Artificial Sequence: Synthetic oligonucleotide
  misc_feature 1..20: note = Target: ANGPTL3; (+) strand; PAM type: NRG; PAM sequence: GAG
  source 1..20: mol_type = other DNA
gagaattttggttgggccta

SEQ ID NO: 9572 - DNA, 20 bp, synthetic construct
  misc_feature 1..20: note = Description of Artificial Sequence: Synthetic oligonucleotide
  misc_feature 1..20: note = Target: ANGPTL3; (+) strand; PAM type: NRG; PAM sequence: AAG
  source 1..20: mol_type = other DNA
aattttggttgggcctagag

SEQ ID NO: 9573 - DNA, 20 bp, synthetic construct
  misc_feature 1..20: note = Description of Artificial Sequence: Synthetic oligonucleotide
  misc_feature 1..20: note = Target: ANGPTL3; (+) strand; PAM type: NRG; PAM sequence: TAG
  source 1..20: mol_type = other DNA
cctagagaagatatactcca

SEQ ID NO: 9574 - DNA, 20 bp, synthetic construct
  misc_feature 1..20: note = Description of Artificial Sequence: Synthetic oligonucleotide
  misc_feature 1..20: note = Target: ANGPTL3; (+) strand; PAM type: NRG; PAM sequence: AAG
  source 1..20: mol_type = other DNA
agaagatatactccatagtg

SEQ ID NO: 9575 - DNA, 20 bp, synthetic construct
  misc_feature 1..20: note = Description of Artificial Sequence: Synthetic oligonucleotide
  misc_feature 1..20: note = Target: ANGPTL3; (+) strand; PAM type: NRG; PAM sequence: GAG
  source 1..20: mol_type = other DNA
ctaattatgttttacgaatt

SEQ ID NO: 9576 - DNA, 20 bp, synthetic construct
  misc_feature 1..20: note = Description of Artificial Sequence: Synthetic oligonucleotide
  misc_feature 1..20: note = Target: ANGPTL3; (+) strand; PAM type: NRG; PAM sequence: TGG
  source 1..20: mol_type = other DNA
ttatgttttacgaattgagt

SEQ ID NO: 9577 - DNA, 20 bp, synthetic construct
  misc_feature 1..20: note = Description of Artificial Sequence: Synthetic oligonucleotide
  misc_feature 1..20: note = Target: ANGPTL3; (+) strand; PAM type: NRG; PAM sequence: AAG
  source 1..20: mol_type = other DNA
tgttttacgaattgagttgg

SEQ ID NO: 9578 - DNA, 20 bp, synthetic construct
  misc_feature 1..20: note = Description of Artificial Sequence: Synthetic oligonucleotide
  misc_feature 1..20: note = Target: ANGPTL3; (+) strand; PAM type: NRG; PAM sequence: TGG
  source 1..20: mol_type = other DNA
tacgaattgagttggaagac

SEQ ID NO: 9579 - DNA, 20 bp, synthetic construct
  misc_feature 1..20: note = Description of Artificial Sequence: Synthetic oligonucleotide
  misc_feature 1..20: note = Target: ANGPTL3; (+) strand; PAM type: NRG; PAM sequence: AAG
  source 1..20: mol_type = other DNA
aattgagttggaagactgga

SEQ ID NO: 9580 - DNA, 20 bp, synthetic construct
  misc_feature 1..20: note = Description of Artificial Sequence: Synthetic oligonucleotide
  misc_feature 1..20: note = Target: ANGPTL3; (+) strand; PAM type: NRG; PAM sequence: TGG
  source 1..20: mol_type = other DNA
tattgaatattctttttact

SEQ ID NO: 9581 - DNA, 20 bp, synthetic construct
  misc_feature 1..20: note = Description of Artificial Sequence: Synthetic oligonucleotide
  misc_feature 1..20: note = Target: ANGPTL3; (+) strand; PAM type: NRG; PAM sequence: GGG
  source 1..20: mol_type = other DNA
attgaatattctttttactt

SEQ ID NO: 9582 - DNA, 20 bp, synthetic construct
  misc_feature 1..20: note = Description of Artificial Sequence: Synthetic oligonucleotide
  misc_feature 1..20: note = Target: ANGPTL3; (+) strand; PAM type: NRG; PAM sequence: TAG
  source 1..20: mol_type = other DNA
aaccaactatacgctacatc

SEQ ID NO: 9583 - DNA, 20 bp, synthetic construct
  misc_feature 1..20: note = Description of Artificial Sequence: Synthetic oligonucleotide
  misc_feature 1..20: note = Target: ANGPTL3; (+) strand; PAM type: NRG; PAM sequence: TGG
  source 1..20: mol_type = other DNA
ctacatctagttgcgattac

SEQ ID NO: 9584 - DNA, 20 bp, synthetic construct
  misc_feature 1..20: note = Description of Artificial Sequence: Synthetic oligonucleotide
  misc_feature 1..20: note = Target: ANGPTL3; (+) strand; PAM type: NRG; PAM sequence: CGG
  source 1..20: mol_type = other DNA
caatgtccccaatgcaatcc

SEQ ID NO: 9585 - DNA, 20 bp, synthetic construct
  misc_feature 1..20: note = Description of Artificial Sequence: Synthetic oligonucleotide
  misc_feature 1..20: note = Target: ANGPTL3; (+) strand; PAM type: NRG; PAM sequence: AAG
  source 1..20: mol_type = other DNA
caatgcaatcccggaaaaca

SEQ ID NO: 9586 - DNA, 20 bp, synthetic construct
  misc_feature 1..20: note = Description of Artificial Sequence: Synthetic oligonucleotide
  misc_feature 1..20: note = Target: ANGPTL3; (+) strand; PAM type: NRG; PAM sequence: TGG
  source 1..20: mol_type = other DNA
aatcccggaaaacaaagatt

SEQ ID NO: 9587 - DNA, 20 bp, synthetic construct
  misc_feature 1..20: note = Description of Artificial Sequence: Synthetic oligonucleotide
  misc_feature 1..20: note = Target: ANGPTL3; (+) strand; PAM type: NRG; PAM sequence: TGG
  source 1..20: mol_type = other DNA
aagatttggtgttttctact

SEQ ID NO: 9588 - DNA, 20 bp, synthetic construct
  misc_feature 1..20: note = Description of Artificial Sequence: Synthetic oligonucleotide
  misc_feature 1..20: note = Target: ANGPTL3; (+) strand; PAM type: NRG; PAM sequence: GGG
  source 1..20: mol_type = other DNA
agatttggtgttttctactt

SEQ ID NO: 9589 - DNA, 20 bp, synthetic construct
  misc_feature 1..20: note = Description of Artificial Sequence: Synthetic oligonucleotide
  misc_feature 1..20: note = Target: ANGPTL3; (+) strand; PAM type: NRG; PAM sequence: AAG
  source 1..20: mol_type = other DNA
gttttctacttgggatcaca

SEQ ID NO: 9590 - DNA, 20 bp, synthetic construct
  misc_feature 1..20: note = Description of Artificial Sequence: Synthetic oligonucleotide
  misc_feature 1..20: note = Target: ANGPTL3; (+) strand; PAM type: NRG; PAM sequence: AAG
  source 1..20: mol_type = other DNA
tacttgggatcacaaagcaa

SEQ ID NO: 9591 - DNA, 20 bp, synthetic construct
  misc_feature 1..20: note = Description of Artificial Sequence: Synthetic oligonucleotide
  misc_feature 1..20: note = Target: ANGPTL3; (+) strand; PAM type: NRG; PAM sequence: AGG
  source 1..20: mol_type = other DNA
acttgggatcacaaagcaaa

SEQ ID NO: 9592 - DNA, 20 bp, synthetic construct
  misc_feature 1..20: note = Description of Artificial Sequence: Synthetic oligonucleotide
  misc_feature 1..20: note = Target: ANGPTL3; (+) strand; PAM type: NRG; PAM sequence: CAG
  source 1..20: mol_type = other DNA
aaaaggacacttcaactgtc

SEQ ID NO: 9593 - DNA, 20 bp, synthetic construct
  misc_feature 1..20: note = Description of Artificial Sequence: Synthetic oligonucleotide
  misc_feature 1..20: note = Target: ANGPTL3; (+) strand; PAM type: NRG; PAM sequence: GAG
  source 1..20: mol_type = other DNA
aaggacacttcaactgtcca

SEQ ID NO: 9594 - DNA, 20 bp, synthetic construct
  misc_feature 1..20: note = Description of Artificial Sequence: Synthetic oligonucleotide
  misc_feature 1..20: note = Target: ANGPTL3; (+) strand; PAM type: NRG; PAM sequence: AGG
  source 1..20: mol_type = other DNA
aggacacttcaactgtccag

SEQ ID NO: 9595 - DNA, 20 bp, synthetic construct
  misc_feature 1..20: note = Description of Artificial Sequence: Synthetic oligonucleotide
  misc_feature 1..20: note = Target: ANGPTL3; (+) strand; PAM type: NRG; PAM sequence: GGG
  source 1..20: mol_type = other DNA
ggacacttcaactgtccaga

SEQ ID NO: 9596 - DNA, 20 bp, synthetic construct
  misc_feature 1..20: note = Description of Artificial Sequence: Synthetic oligonucleotide
  misc_feature 1..20: note = Target: ANGPTL3; (+) strand; PAM type: NRG; PAM sequence: CAG
  source 1..20: mol_type = other DNA
caactgtccagagggttatt

SEQ ID NO: 9597 - DNA, 20 bp, synthetic construct
  misc_feature 1..20: note = Description of Artificial Sequence: Synthetic oligonucleotide
  misc_feature 1..20: note = Target: ANGPTL3; (+) strand; PAM type: NRG; PAM sequence: AGG
  source 1..20: mol_type = other DNA
aactgtccagagggttattc

SEQ ID NO: 9598 - DNA, 20 bp, synthetic construct
  misc_feature 1..20: note = Description of Artificial Sequence: Synthetic oligonucleotide
  misc_feature 1..20: note = Target: ANGPTL3; (+) strand; PAM type: NRG; PAM sequence: AAG
  source 1..20: mol_type = other DNA
actttattttcatatcttca

SEQ ID NO: 9599 - DNA, 20 bp, synthetic construct
  misc_feature 1..20: note = Description of Artificial Sequence: Synthetic oligonucleotide
  misc_feature 1..20: note = Target: ANGPTL3; (+) strand; PAM type: NRG; PAM sequence: TAG
  source 1..20: mol_type = other DNA
aaagtatcttcccacattat

SEQ ID NO: 9600 - DNA, 20 bp, synthetic construct
  misc_feature 1..20: note = Description of Artificial Sequence: Synthetic oligonucleotide
  misc_feature 1..20: note = Target: ANGPTL3; (+) strand; PAM type: NRG; PAM sequence: AAG
  source 1..20: mol_type = other DNA
taaaaatccgaatcccaaat

SEQ ID NO: 9601 - DNA, 20 bp, synthetic construct
  misc_feature 1..20: note = Description of Artificial Sequence: Synthetic oligonucleotide
  misc_feature 1..20: note = Target: ANGPTL3; (+) strand; PAM type: NRG; PAM sequence: TAG
  source 1..20: mol_type = other DNA
ccaaataagcgttttctctc

SEQ ID NO: 9602 - DNA, 20 bp, synthetic construct
  misc_feature 1..20: note = Description of Artificial Sequence: Synthetic oligonucleotide
  misc_feature 1..20: note = Target: ANGPTL3; (+) strand; PAM type: NRG; PAM sequence: AAG
  source 1..20: mol_type = other DNA
aaacctcttaactataatga

SEQ ID NO: 9603 - DNA, 20 bp, synthetic construct
  misc_feature 1..20: note = Description of Artificial Sequence: Synthetic oligonucleotide
  misc_feature 1..20: note = Target: ANGPTL3; (+) strand; PAM type: NRG; PAM sequence: TAG
  source 1..20: mol_type = other DNA
tataatgaaagtgttcattc

SEQ ID NO: 9604 - DNA, 20 bp, synthetic construct
  misc_feature 1..20: note = Description of Artificial Sequence: Synthetic oligonucleotide
  misc_feature 1..20: note = Target: ANGPTL3; (+) strand; PAM type: NRG; PAM sequence: CAG
  source 1..20: mol_type = other DNA
agtgttcattctagttcaat

SEQ ID NO: 9605 - DNA, 20 bp, synthetic construct
  misc_feature 1..20: note = Description of Artificial Sequence: Synthetic oligonucleotide
  misc_feature 1..20: note = Target: ANGPTL3; (+) strand; PAM type: NRG; PAM sequence: AGG
  source 1..20: mol_type = other DNA
gtgttcattctagttcaatc

SEQ ID NO: 9606 - DNA, 20 bp, synthetic construct
  misc_feature 1..20: note = Description of Artificial Sequence: Synthetic oligonucleotide
  misc_feature 1..20: note = Target: ANGPTL3; (+) strand; PAM type: NRG; PAM sequence: CAG
  source 1..20: mol_type = other DNA
attttacctctaatcttcct

SEQ ID NO: 9607 - DNA, 20 bp, synthetic construct
  misc_feature 1..20: note = Description of Artificial Sequence: Synthetic oligonucleotide
  misc_feature 1..20: note = Target: ANGPTL3; (+) strand; PAM type: NRG; PAM sequence: TGG
  source 1..20: mol_type = other DNA
tcctcagattttctattttt

SEQ ID NO: 9608 - DNA, 20 bp, synthetic construct
  misc_feature 1..20: note = Description of Artificial Sequence: Synthetic oligonucleotide
  misc_feature 1..20: note = Target: ANGPTL3; (+) strand; PAM type: NRG; PAM sequence: TAG
  source 1..20: mol_type = other DNA
tcagattttctattttttgg

SEQ ID NO: 9609 - DNA, 20 bp, synthetic construct
  misc_feature 1..20: note = Description of Artificial Sequence: Synthetic oligonucleotide
  misc_feature 1..20: note = Target: ANGPTL3; (+) strand; PAM type: NRG; PAM sequence: TAG
  source 1..20: mol_type = other DNA
ttctattttttggtagtgta

SEQ ID NO: 9610 - DNA, 20 bp, synthetic construct
  misc_feature 1..20: note = Description of Artificial Sequence: Synthetic oligonucleotide
  misc_feature 1..20: note = Target: ANGPTL3; (+) strand; PAM type: NRG; PAM sequence: CAG
  source 1..20: mol_type = other DNA
tagtgtatagattatttata

SEQ ID NO: 9611 - DNA, 20 bp, synthetic construct
  misc_feature 1..20: note = Description of Artificial Sequence: Synthetic oligonucleotide
  misc_feature 1..20: note = Target: ANGPTL3; (+) strand; PAM type: NRG; PAM sequence: TGG
  source 1..20: mol_type = other DNA
ttatacagattatttaaaat

SEQ ID NO: 9612 - DNA, 20 bp, synthetic construct
  misc_feature 1..20: note = Description of Artificial Sequence: Synthetic oligonucleotide
  misc_feature 1..20: note = Target: ANGPTL3; (+) strand; PAM type: NRG; PAM sequence: GGG
  source 1..20: mol_type = other DNA
tatacagattatttaaaatt

SEQ ID NO: 9613 - DNA, 20 bp, synthetic construct
  misc_feature 1..20: note = Description of Artificial Sequence: Synthetic oligonucleotide
  misc_feature 1..20: note = Target: ANGPTL3; (+) strand; PAM type: NRG; PAM sequence: CAG
  source 1..20: mol_type = other DNA
atttaaaattgggacttata

SEQ ID NO: 9614 - DNA, 20 bp, synthetic construct
  misc_feature 1..20: note = Description of Artificial Sequence: Synthetic oligonucleotide
  misc_feature 1..20: note = Target: ANGPTL3; (+) strand; PAM type: NRG; PAM sequence: TGG
  source 1..20: mol_type = other DNA
ttatacagattatttaaaac

SEQ ID NO: 9615 - DNA, 20 bp, synthetic construct
  misc_feature 1..20: note = Description of Artificial Sequence: Synthetic oligonucleotide
  misc_feature 1..20: note = Target: ANGPTL3; (+) strand; PAM type: NRG; PAM sequence: GGG
  source 1..20: mol_type = other DNA
tatacagattatttaaaact

SEQ ID NO: 9616 - DNA, 20 bp, synthetic construct
  misc_feature 1..20: note = Description of Artificial Sequence: Synthetic oligonucleotide
  misc_feature 1..20: note = Target: ANGPTL3; (+) strand; PAM type: NRG; PAM sequence: AAG
  source 1..20: mol_type = other DNA
taaaacactgtaatatttat

SEQ ID NO: 9617 - DNA, 20 bp, synthetic construct
  misc_feature 1..20: note = Description of Artificial Sequence: Synthetic oligonucleotide
  misc_feature 1..20: note = Target: ANGPTL3; (+) strand; PAM type: NRG; PAM sequence: AAG
  source 1..20: mol_type = other DNA
acactgtaatatttataaga

SEQ ID NO: 9618 - DNA, 20 bp, synthetic construct
  misc_feature 1..20: note = Description of Artificial Sequence: Synthetic oligonucleotide
  misc_feature 1..20: note = Target: ANGPTL3; (+) strand; PAM type: NRG; PAM sequence: AGG
  source 1..20: mol_type = other DNA
cactgtaatatttataagaa

SEQ ID NO: 9619 - DNA, 20 bp, synthetic construct
  misc_feature 1..20: note = Description of Artificial Sequence: Synthetic oligonucleotide
  misc_feature 1..20: note = Target: ANGPTL3; (+) strand; PAM type: NRG; PAM sequence: AAG
  source 1..20: mol_type = other DNA
tgtaatatttataagaaagg

SEQ ID NO: 9620 - DNA, 20 bp, synthetic construct
  misc_feature 1..20: note = Description of Artificial Sequence: Synthetic oligonucleotide
  misc_feature 1..20: note = Target: ANGPTL3; (+) strand; PAM type: NRG; PAM sequence: CGG
  source 1..20: mol_type = other DNA
aagaaaggaagataaactta

SEQ ID NO: 9621 - DNA, 20 bp, synthetic construct
  misc_feature 1..20: note = Description of Artificial Sequence: Synthetic oligonucleotide
  misc_feature 1..20: note = Target: ANGPTL3; (+) strand; PAM type: NRG; PAM sequence: GGG
  source 1..20: mol_type = other DNA
agaaaggaagataaacttac

SEQ ID NO: 9622 - DNA, 20 bp, synthetic construct
  misc_feature 1..20: note = Description of Artificial Sequence: Synthetic oligonucleotide
  misc_feature 1..20: note = Target: ANGPTL3; (+) strand; PAM type: NRG; PAM sequence: GGG
  source 1..20: mol_type = other DNA
gaaaggaagataaacttacg

SEQ ID NO: 9623 - DNA, 20 bp, synthetic construct
  misc_feature 1..20: note = Description of Artificial Sequence: Synthetic oligonucleotide
  misc_feature 1..20: note = Target: ANGPTL3; (+) strand; PAM type: NRG; PAM sequence: CAG
  source 1..20: mol_type = other DNA
gataaacttacggggaaata

SEQ ID NO: 9624 - DNA, 20 bp, synthetic construct
  misc_feature 1..20: note = Description of Artificial Sequence: Synthetic oligonucleotide
  misc_feature 1..20: note = Target: ANGPTL3; (+) strand; PAM type: NRG; PAM sequence: CAG
  source 1..20: mol_type = other DNA
cttacggggaaatacagtaa

SEQ ID NO: 9625 - DNA, 20 bp, synthetic construct
  misc_feature 1..20: note = Description of Artificial Sequence: Synthetic oligonucleotide
  misc_feature 1..20: note = Target: ANGPTL3; (+) strand; PAM type: NRG; PAM sequence: GAG
  source 1..20: mol_type = other DNA
cagtaacagtaactacatac

SEQ ID NO: 9626 - DNA, 20 bp, synthetic construct
  misc_feature 1..20: note = Description of Artificial Sequence: Synthetic oligonucleotide
  misc_feature 1..20: note = Target: ANGPTL3; (+) strand; PAM type: NRG; PAM sequence: TAG
  source 1..20: mol_type = other DNA
aattgcatatctatctcctt

SEQ ID NO: 9627 - DNA, 20 bp, synthetic construct
  misc_feature 1..20: note = Description of Artificial Sequence: Synthetic oligonucleotide
  misc_feature 1..20: note = Target: ANGPTL3; (+) strand; PAM type: NRG; PAM sequence: AGG
  source 1..20: mol_type = other DNA
attgcatatctatctccttt

SEQ ID NO: 9628 - DNA, 20 bp, synthetic construct
  misc_feature 1..20: note = Description of Artificial Sequence: Synthetic oligonucleotide
  misc_feature 1..20: note = Target: ANGPTL3; (+) strand; PAM type: NRG; PAM sequence: GAG
  source 1..20: mol_type = other DNA
tgcatatctatctcctttag

SEQ ID NO: 9629 - DNA, 20 bp, synthetic construct
  misc_feature 1..20: note = Description of Artificial Sequence: Synthetic oligonucleotide
  misc_feature 1..20: note = Target: ANGPTL3; (+) strand; PAM type: NRG; PAM sequence: AGG
  source 1..20: mol_type = other DNA
gcatatctatctcctttagg

SEQ ID NO: 9630 - DNA, 20 bp, synthetic construct
  misc_feature 1..20: note = Description of Artificial Sequence: Synthetic oligonucleotide
  misc_feature 1..20: note = Target: ANGPTL3; (+) strand; PAM type: NRG; PAM sequence: TGG
  source 1..20: mol_type = other DNA
atctatctcctttaggaggc

SEQ ID NO: 9631 - DNA, 20 bp, synthetic construct
  misc_feature 1..20: note = Description of Artificial Sequence: Synthetic oligonucleotide
  misc_feature 1..20: note = Target: ANGPTL3; (+) strand; PAM type: NRG; PAM sequence: TGG
  source 1..20: mol_type = other DNA
tatctcctttaggaggctgg

SEQ ID NO: 9632 - DNA, 20 bp, synthetic construct
  misc_feature 1..20: note = Description of Artificial Sequence: Synthetic oligonucleotide
  misc_feature 1..20: note = Target: ANGPTL3; (+) strand; PAM type: NRG; PAM sequence: TGG
  source 1..20: mol_type = other DNA
ctcctttaggaggctggtgg

SEQ ID NO: 9633 - DNA, 20 bp, synthetic construct
  misc_feature 1..20: note = Description of Artificial Sequence: Synthetic oligonucleotide
  misc_feature 1..20: note = Target: ANGPTL3; (+) strand; PAM type: NRG; PAM sequence: GAG
  source 1..20: mol_type = other DNA
gaggctggtggtggcatgat

SEQ ID NO: 9634 - DNA, 20 bp, synthetic construct
  misc_feature 1..20: note = Description of Artificial Sequence: Synthetic oligonucleotide
  misc_feature 1..20: note = Target: ANGPTL3; (+) strand; PAM type: NRG; PAM sequence: TGG
  source 1..20: mol_type = other DNA
tggtggtggcatgatgagtg

SEQ ID NO: 9635 - DNA, 20 bp, synthetic construct
  misc_feature 1..20: note = Description of Artificial Sequence: Synthetic oligonucleotide
  misc_feature 1..20: note = Target: ANGPTL3; (+) strand; PAM type: NRG; PAM sequence: GAG
  source 1..20: mol_type = other DNA
gtggtggcatgatgagtgtg

SEQ ID NO: 9636 - DNA, 20 bp, synthetic construct
  misc_feature 1..20: note = Description of Artificial Sequence: Synthetic oligonucleotide
  misc_feature 1..20: note = Target: ANGPTL3; (+) strand; PAM type: NRG; PAM sequence: TGG
  source 1..20: mol_type = other DNA
tgtggagaaaacaacctaaa

SEQ ID NO: 9637 - DNA, 20 bp, synthetic construct
  misc_feature 1..20: note = Description of Artificial Sequence: Synthetic oligonucleotide
  misc_feature 1..20: note = Target: ANGPTL3; (+) strand; PAM type: NRG; PAM sequence: AAG
  source 1..20: mol_type = other DNA
aatggtaaatataacaaacc

SEQ ID NO: 9638 - DNA, 20 bp, synthetic construct
  misc_feature 1..20: note = Description of Artificial Sequence: Synthetic oligonucleotide
  misc_feature 1..20: note = Target: ANGPTL3; (+) strand; PAM type: NRG; PAM sequence: GAG
  source 1..20: mol_type = other DNA
tggtaaatataacaaaccaa

SEQ ID NO: 9639 - DNA, 20 bp, synthetic construct
  misc_feature 1..20: note = Description of Artificial Sequence: Synthetic oligonucleotide
  misc_feature 1..20: note = Target: ANGPTL3; (+) strand; PAM type: NRG; PAM sequence: AAG
  source 1..20: mol_type = other DNA
acaaaccaagagcaaaatct

SEQ ID NO: 9640 - DNA, 20 bp, synthetic construct
  misc_feature 1..20: note = Description of Artificial Sequence: Synthetic oligonucleotide
  misc_feature 1..20: note = Target: ANGPTL3; (+) strand; PAM type: NRG; PAM sequence: CAG
  source 1..20: mol_type = other DNA
accaagagcaaaatctaagc

SEQ ID NO: 9641 - DNA, 20 bp, synthetic construct
  misc_feature 1..20: note = Description of Artificial Sequence: Synthetic oligonucleotide
  misc_feature 1..20: note = Target: ANGPTL3; (+) strand; PAM type: NRG; PAM sequence: GAG
  source 1..20: mol_type = other DNA
caagagcaaaatctaagcca

SEQ ID NO: 9642 - DNA, 20 bp, synthetic construct
  misc_feature 1..20: note = Description of Artificial Sequence: Synthetic oligonucleotide
  misc_feature 1..20: note = Target: ANGPTL3; (+) strand; PAM type: NRG; PAM sequence: GAG
  source 1..20: mol_type = other DNA
agagcaaaatctaagccaga

SEQ ID NO: 9643 - DNA, 20 bp, synthetic construct
  misc_feature 1..20: note = Description of Artificial Sequence: Synthetic oligonucleotide
  misc_feature 1..20: note = Target: ANGPTL3; (+) strand; PAM type: NRG; PAM sequence: AGG
  source 1..20: mol_type = other DNA
gagcaaaatctaagccagag

SEQ ID NO: 9644 - DNA, 20 bp, synthetic construct
  misc_feature 1..20: note = Description of Artificial Sequence: Synthetic oligonucleotide
  misc_feature 1..20: note = Target: ANGPTL3; (+) strand; PAM type: NRG; PAM sequence: GAG
  source 1..20: mol_type = other DNA
gcaaaatctaagccagagag

SEQ ID NO: 9645 - DNA, 20 bp, synthetic construct
  misc_feature 1..20: note = Description of Artificial Sequence: Synthetic oligonucleotide
  misc_feature 1..20: note = Target: ANGPTL3; (+) strand; PAM type: NRG; PAM sequence: AAG
  source 1..20: mol_type = other DNA
aaatctaagccagagaggag

SEQ ID NO: 9646 - DNA, 20 bp, synthetic construct
  misc_feature 1..20: note = Description of Artificial Sequence: Synthetic oligonucleotide
  misc_feature 1..20: note = Target: ANGPTL3; (+) strand; PAM type: NRG; PAM sequence: GAG
  source 1..20: mol_type = other DNA
atctaagccagagaggagaa

SEQ ID NO: 9647 - DNA, 20 bp, synthetic construct
  misc_feature 1..20: note = Description of Artificial Sequence: Synthetic oligonucleotide
  misc_feature 1..20: note = Target: ANGPTL3; (+) strand; PAM type: NRG; PAM sequence: AGG
  source 1..20: mol_type = other DNA
tctaagccagagaggagaag

SEQ ID NO: 9648 - DNA, 20 bp, synthetic construct
  misc_feature 1..20: note = Description of Artificial Sequence: Synthetic oligonucleotide
  misc_feature 1..20: note = Target: ANGPTL3; (+) strand; PAM type: NRG; PAM sequence: TGG
  source 1..20: mol_type = other DNA
agaggagaagaggattatct

SEQ ID NO: 9649 - DNA, 20 bp, synthetic construct
  misc_feature 1..20: note = Description of Artificial Sequence: Synthetic oligonucleotide
  misc_feature 1..20: note = Target: ANGPTL3; (+) strand; PAM type: NRG; PAM sequence: AAG
  source 1..20: mol_type = other DNA
ggagaagaggattatcttgg

SEQ ID NO: 9650 - DNA, 20 bp, synthetic construct
  misc_feature 1..20: note = Description of Artificial Sequence: Synthetic oligonucleotide
  misc_feature 1..20: note = Target: ANGPTL3; (+) strand; PAM type: NRG; PAM sequence: TGG
  source 1..20: mol_type = other DNA
ttatcttggaagtctcaaaa

SEQ ID NO: 9651 - DNA, 20 bp, synthetic construct
  misc_feature 1..20: note = Description of Artificial Sequence: Synthetic oligonucleotide
  misc_feature 1..20: note = Target: ANGPTL3; (+) strand; PAM type: NRG; PAM sequence: AAG
  source 1..20: mol_type = other DNA
tcttggaagtctcaaaatgg

SEQ ID NO: 9652 - DNA, 20 bp, synthetic construct
  misc_feature 1..20: note = Description of Artificial Sequence: Synthetic oligonucleotide
  misc_feature 1..20: note = Target: ANGPTL3; (+) strand; PAM type: NRG; PAM sequence: AGG
  source 1..20: mol_type = other DNA
cttggaagtctcaaaatgga

SEQ ID NO: 9653 - DNA, 20 bp, synthetic construct
  misc_feature 1..20: note = Description of Artificial Sequence: Synthetic oligonucleotide
  misc_feature 1..20: note = Target: ANGPTL3; (+) strand; PAM type: NRG; PAM sequence: CAG
  source 1..20: mol_type = other DNA
caaaatgttgatccatccaa

SEQ ID NO: 9654 - DNA, 20 bp, synthetic construct
  misc_feature 1..20: note = Description of Artificial Sequence: Synthetic oligonucleotide
  misc_feature 1..20: note = Target: ANGPTL3; (+) strand; PAM type: NRG; PAM sequence: CAG
  source 1..20: mol_type = other DNA
gttgatccatccaacagatt

SEQ ID NO: 9655 - DNA, 20 bp, synthetic construct
  misc_feature 1..20: note = Description of Artificial Sequence: Synthetic oligonucleotide
  misc_feature 1..20: note = Target: ANGPTL3; (+) strand; PAM type: NRG; PAM sequence: AAG
  source 1..20: mol_type = other DNA
atccatccaacagattcaga

SEQ ID NO: 9656 - DNA, 20 bp, synthetic construct
  misc_feature 1..20: note = Description of Artificial Sequence: Synthetic oligonucleotide
  misc_feature 1..20: note = Target: ANGPTL3; (+) strand; PAM type: NRG; PAM sequence: GAG
  source 1..20: mol_type = other DNA
cagaaagctttgaatgaact

SEQ ID NO: 9657 - DNA, 20 bp, synthetic construct
  misc_feature 1..20: note = Description of Artificial Sequence: Synthetic oligonucleotide
  misc_feature 1..20: note = Target: ANGPTL3; (+) strand; PAM type: NRG; PAM sequence: AGG
  source 1..20: mol_type = other DNA
agaaagctttgaatgaactg

SEQ ID NO: 9658 - DNA, 20 bp, synthetic construct
  misc_feature 1..20: note = Description of Artificial Sequence: Synthetic oligonucleotide
  misc_feature 1..20: note = Target: ANGPTL3; (+) strand; PAM type: NRG; PAM sequence: AAG
  source 1..20: mol_type = other DNA
atgaactgaggcaaatttaa

SEQ ID NO: 9659 - DNA, 20 bp, synthetic construct
  misc_feature 1..20: note = Description of Artificial Sequence: Synthetic oligonucleotide
  misc_feature 1..20: note = Target: ANGPTL3; (+) strand; PAM type: NRG; PAM sequence: AGG
  source 1..20: mol_type = other DNA
tgaactgaggcaaatttaaa

SEQ ID NO: 9660 - DNA, 20 bp, synthetic construct
  misc_feature 1..20: note = Description of Artificial Sequence: Synthetic oligonucleotide
  misc_feature 1..20: note = Target: ANGPTL3; (+) strand; PAM type: NRG; PAM sequence: AAG
  source 1..20: mol_type = other DNA
ttaaacattaacctcattcc

SEQ ID NO: 9661 - DNA, 20 bp, synthetic construct
  misc_feature 1..20: note = Description of Artificial Sequence: Synthetic oligonucleotide
  misc_feature 1..20: note = Target: ANGPTL3; (+) strand; PAM type: NRG; PAM sequence: TGG
  source 1..20: mol_type = other DNA
aacctcattccaagttaatg

SEQ ID NO: 9662 - DNA, 20 bp, synthetic construct
  misc_feature 1..20: note = Description of Artificial Sequence: Synthetic oligonucleotide
  misc_feature 1..20: note = Target: ANGPTL3; (+) strand; PAM type: NRG; PAM sequence: TGG
  source 1..20: mol_type = other DNA
gttaatgtggtctaataatc

SEQ ID NO: 9663 - DNA, 20 bp, synthetic construct
  misc_feature 1..20: note = Description of Artificial Sequence: Synthetic oligonucleotide
  misc_feature 1..20: note = Target: ANGPTL3; (+) strand; PAM type: NRG; PAM sequence: AAG
  source 1..20: mol_type = other DNA
taatctggtattaaatcctt

SEQ ID NO: 9664 - DNA, 20 bp, synthetic construct
  misc_feature 1..20: note = Description of Artificial Sequence: Synthetic oligonucleotide
  misc_feature 1..20: note = Target: ANGPTL3; (+) strand; PAM type: NRG; PAM sequence: GAG
  source 1..20: mol_type = other DNA
atctggtattaaatccttaa

SEQ ID NO: 9665 - DNA, 20 bp, synthetic construct
  misc_feature 1..20: note = Description of Artificial Sequence: Synthetic oligonucleotide
  misc_feature 1..20: note = Target: ANGPTL3; (+) strand; PAM type: NRG; PAM sequence: AAG
  source 1..20: mol_type = other DNA
ggtattaaatccttaagaga

SEQ ID NO: 9666 - DNA, 20 bp, synthetic construct
  misc_feature 1..20: note = Description of Artificial Sequence: Synthetic oligonucleotide
  misc_feature 1..20: note = Target: ANGPTL3; (+) strand; PAM type: NRG; PAM sequence: GAG
  source 1..20: mol_type = other DNA
aaatccttaagagaaagctt

SEQ ID NO: 9667 - DNA, 20 bp, synthetic construct
  misc_feature 1..20: note = Description of Artificial Sequence: Synthetic oligonucleotide
  misc_feature 1..20: note = Target: ANGPTL3; (+) strand; PAM type: NRG; PAM sequence: TAG
  source 1..20: mol_type = other DNA
ttaagagaaagcttgagaaa

SEQ ID NO: 9668 - DNA, 20 bp, synthetic construct
  misc_feature 1..20: note = Description of Artificial Sequence: Synthetic oligonucleotide
  misc_feature 1..20: note = Target: ANGPTL3; (+) strand; PAM type: NRG; PAM sequence: AAG
  source 1..20: mol_type = other DNA
aatagattttttttatctta

SEQ ID NO: 9669 - DNA, 20 bp, synthetic construct
  misc_feature 1..20: note = Description of Artificial Sequence: Synthetic oligonucleotide
  misc_feature 1..20: note = Target: ANGPTL3; (+) strand; PAM type: NRG; PAM sequence: AAG
  source 1..20: mol_type = other DNA
cttaaagtcactgtctattt

SEQ ID NO: 9670 - DNA, 20 bp, synthetic construct
  misc_feature 1..20: note = Description of Artificial Sequence: Synthetic oligonucleotide
  misc_feature 1..20: note = Target: ANGPTL3; (+) strand; PAM type: NRG; PAM sequence: AAG
  source 1..20: mol_type = other DNA
catacaatcacataacctta

SEQ ID NO: 9671 - DNA, 20 bp, synthetic construct
  misc_feature 1..20: note = Description of Artificial Sequence: Synthetic oligonucleotide
  misc_feature 1..20: note = Target: ANGPTL3; (+) strand; PAM type: NRG; PAM sequence: TGG
  source 1..20: mol_type = other DNA
ttgttttaaattttgtgatg

SEQ ID NO: 9672 - DNA, 20 bp, synthetic construct
  misc_feature 1..20: note = Description of Artificial Sequence: Synthetic oligonucleotide
  misc_feature 1..20: note = Target: ANGPTL3; (+) strand; PAM type: NRG; PAM sequence: GGG
  source 1..20: mol_type = other DNA
tgttttaaattttgtgatgt

SEQ ID NO: 9673 - DNA, 20 bp, synthetic construct
  misc_feature 1..20: note = Description of Artificial Sequence: Synthetic oligonucleotide
  misc_feature 1..20: note = Target: ANGPTL3; (+) strand; PAM type: NRG; PAM sequence: TAG
  source 1..20: mol_type = other DNA
tgtgatgtgggaatcaattt

SEQ ID NO: 9674 - DNA, 20 bp, synthetic construct
  misc_feature 1..20: note = Description of Artificial Sequence: Synthetic oligonucleotide
  misc_feature 1..20: note = Target: ANGPTL3; (+) strand; PAM type: NRG; PAM sequence: TGG
  source 1..20: mol_type = other DNA
atgtgggaatcaattttaga

SEQ ID NO: 9675 - DNA, 20 bp, synthetic construct
  misc_feature 1..20: note = Description of Artificial Sequence: Synthetic oligonucleotide
  misc_feature 1..20: note = Target: ANGPTL3; (+) strand; PAM type: NRG; PAM sequence: TAG
  source 1..20: mol_type = other DNA
aattttagatggtcacaatc

SEQ ID NO: 9676 - DNA, 20 bp, synthetic construct
  misc_feature 1..20: note = Description of Artificial Sequence: Synthetic oligonucleotide
  misc_feature 1..20: note = Target: ANGPTL3; (+) strand; PAM type: NRG; PAM sequence: TAG
  source 1..20: mol_type = other DNA
acaatctagattataatcaa

SEQ ID NO: 9677 - DNA, 20 bp, synthetic construct
  misc_feature 1..20: note = Description of Artificial Sequence: Synthetic oligonucleotide
  misc_feature 1..20: note = Target: ANGPTL3; (+) strand; PAM type: NRG; PAM sequence: AGG
  source 1..20: mol_type = other DNA
caatctagattataatcaat

SEQ ID NO: 9678 - DNA, 20 bp, synthetic construct
  misc_feature 1..20: note = Description of Artificial Sequence: Synthetic oligonucleotide
  misc_feature 1..20: note = Target: ANGPTL3; (+) strand; PAM type: NRG; PAM sequence: TAG
  source 1..20: mol_type = other DNA
acttttctaaataaaaaatt

SEQ ID NO: 9679 - DNA, 20 bp, synthetic construct
  misc_feature 1..20: note = Description of Artificial Sequence: Synthetic oligonucleotide
  misc_feature 1..20: note = Target: ANGPTL3; (+) strand; PAM type: NRG; PAM sequence: GAG
  source 1..20: mol_type = other DNA
ttttctaaataaaaaattta

SEQ ID NO: 9680 - DNA, 20 bp, synthetic construct
  misc_feature 1..20: note = Description of Artificial Sequence: Synthetic oligonucleotide
  misc_feature 1..20: note = Target: ANGPTL3; (+) strand; PAM type: NRG; PAM sequence: AAG
  source 1..20: mol_type = other DNA
tttagagacttttattttaa

SEQ ID NO: 9681 - DNA, 20 bp, synthetic construct
  misc_feature 1..20: note = Description of Artificial Sequence: Synthetic oligonucleotide
  misc_feature 1..20: note = Target: ANGPTL3; (+) strand; PAM type: NRG; PAM sequence: AGG
  source 1..20: mol_type = other DNA
ttagagacttttattttaaa

SEQ ID NO: 9682 - DNA, 20 bp, synthetic construct
  misc_feature 1..20: note = Description of Artificial Sequence: Synthetic oligonucleotide
  misc_feature 1..20: note = Target: ANGPTL3; (+) strand; PAM type: NRG; PAM sequence: GAG
  source 1..20: mol_type = other DNA
tattttaaaaggcatcatat

SEQ ID NO: 9683 - DNA, 20 bp, synthetic construct
  misc_feature 1..20: note = Description of Artificial Sequence: Synthetic oligonucleotide
  misc_feature 1..20: note = Target: ANGPTL3; (+) strand; PAM type: NRG; PAM sequence: CAG
  source 1..20: mol_type = other DNA
agctaatatcacaactttcc

SEQ ID NO: 9684 - DNA, 20 bp, synthetic construct
  misc_feature 1..20: note = Description of Artificial Sequence: Synthetic oligonucleotide
  misc_feature 1..20: note = Target: ANGPTL3; (+) strand; PAM type: NRG; PAM sequence: TAG
  source 1..20: mol_type = other DNA
actttcccagtttaaaaaac

SEQ ID NO: 9685 - DNA, 20 bp, synthetic construct
  misc_feature 1..20: note = Description of Artificial Sequence: Synthetic oligonucleotide
  misc_feature 1..20: note = Target: ANGPTL3; (+) strand; PAM type: NRG; PAM sequence: CAG
  source 1..20: mol_type = other DNA
actctaaacttgactaaata

SEQ ID NO: 9686 - DNA, 20 bp, synthetic construct
  misc_feature 1..20: note = Description of Artificial Sequence: Synthetic oligonucleotide
  misc_feature 1..20: note = Target: ANGPTL3; (+) strand; PAM type: NRG; PAM sequence: GAG
  source 1..20: mol_type = other DNA
tctaaacttgactaaataca

SEQ ID NO: 9687 - DNA, 20 bp, synthetic construct
  misc_feature 1..20: note = Description of Artificial Sequence: Synthetic oligonucleotide
  misc_feature 1..20: note = Target: ANGPTL3; (+) strand; PAM type: NRG; PAM sequence: AGG
  source 1..20: mol_type = other DNA
ctaaacttgactaaatacag

SEQ ID NO: 9688 - DNA, 20 bp, synthetic construct
  misc_feature 1..20: note = Description of Artificial Sequence: Synthetic oligonucleotide
  misc_feature 1..20: note = Target: ANGPTL3; (+) strand; PAM type: NRG; PAM sequence: TGG
  source 1..20: mol_type = other DNA
cttgactaaatacagaggac

SEQ ID NO: 9689 - DNA, 20 bp, synthetic construct
  misc_feature 1..20: note = Description of Artificial Sequence: Synthetic oligonucleotide
  misc_feature 1..20: note = Target: ANGPTL3; (+) strand; PAM type: NRG; PAM sequence: CAG
  source 1..20: mol_type = other DNA
acagaggactggtaattgta

SEQ ID NO: 9690 - DNA, 20 bp, synthetic construct
  misc_feature 1..20: note = Description of Artificial Sequence: Synthetic oligonucleotide
  misc_feature 1..20: note = Target: ANGPTL3; (+) strand; PAM type: NRG; PAM sequence: TAG
  source 1..20: mol_type = other DNA
tgtacagttcttaaatgttg

SEQ ID NO: 9691 - DNA, 20 bp, synthetic construct
  misc_feature 1..20: note = Description of Artificial Sequence: Synthetic oligonucleotide
  misc_feature 1..20: note = Target: ANGPTL3; (+) strand; PAM type: NRG; PAM sequence: CAG
  source 1..20: mol_type = other DNA
atttcaaaactaaaaatcgt

SEQ ID NO: 9692 - DNA, 20 bp, synthetic construct
  misc_feature 1..20: note = Description of Artificial Sequence: Synthetic oligonucleotide
  misc_feature 1..20: note = Target: ANGPTL3; (+) strand; PAM type: NRG; PAM sequence: CAG
  source 1..20: mol_type = other DNA
aaaactaaaaatcgtcagca

SEQ ID NO: 9693 - DNA, 20 bp, synthetic construct
  misc_feature 1..20: note = Description of Artificial Sequence: Synthetic oligonucleotide
  misc_feature 1..20: note = Target: ANGPTL3; (+) strand; PAM type: NRG; PAM sequence: GAG
  source 1..20: mol_type = other DNA
aactaaaaatcgtcagcaca

SEQ ID NO: 9694 - DNA, 20 bp, synthetic construct
  misc_feature 1..20: note = Description of Artificial Sequence: Synthetic oligonucleotide
  misc_feature 1..20: note = Target: ANGPTL3; (+) strand; PAM type: NRG; PAM sequence: TGG
  source 1..20: mol_type = other DNA
cattttgctacaaaataatt

SEQ ID NO: 9695 - DNA, 20 bp, synthetic construct
  misc_feature 1..20: note = Description of Artificial Sequence: Synthetic oligonucleotide
  misc_feature 1..20: note = Target: ANGPTL3; (+) strand; PAM type: NRG; PAM sequence: GAG
  source 1..20: mol_type = other DNA
ttttgctacaaaataatttg

SEQ ID NO: 9696 - DNA, 20 bp, synthetic construct
  misc_feature 1..20: note = Description of Artificial Sequence: Synthetic oligonucleotide
  misc_feature 1..20: note = Target: ANGPTL3; (+) strand; PAM type: NRG; PAM sequence: AAG
  source 1..20: mol_type = other DNA
tttatttatgaaacctaatg

SEQ ID NO: 9697 - DNA, 20 bp, synthetic construct
  misc_feature 1..20: note = Description of Artificial Sequence: Synthetic oligonucleotide
  misc_feature 1..20: note = Target: ANGPTL3; (+) strand; PAM type: NRG; PAM sequence: CAG
  source 1..20: mol_type = other DNA
atttatgaaacctaatgaag

SEQ ID NO: 9698 - DNA, 20 bp, synthetic construct
  misc_feature 1..20: note = Description of Artificial Sequence: Synthetic oligonucleotide
  misc_feature 1..20: note = Target: ANGPTL3; (+) strand; PAM type: NRG; PAM sequence: AAG
  source 1..20: mol_type = other DNA
attaaatactgtattaaaat

SEQ ID NO: 9699 - DNA, 20 bp, synthetic construct
  misc_feature 1..20: note = Description of Artificial Sequence: Synthetic oligonucleotide
  misc_feature 1..20: note = Target: ANGPTL3; (+) strand; PAM type: NRG; PAM sequence: TGG
  source 1..20: mol_type = other DNA
gttcgctgtctttaaacaaa

SEQ ID NO: 9700 - DNA, 20 bp, synthetic construct
  misc_feature 1..20: note = Description of Artificial Sequence: Synthetic oligonucleotide
  misc_feature 1..20: note = Target: ANGPTL3; (+) strand; PAM type: NRG; PAM sequence: GAG
  source 1..20: mol_type = other DNA
tcgctgtctttaaacaaatg

SEQ ID NO: 9701 - DNA, 20 bp, synthetic construct
  misc_feature 1..20: note = Description of Artificial Sequence: Synthetic oligonucleotide
  misc_feature 1..20: note = Target: ANGPTL3; (+) strand; PAM type: NRG; PAM sequence: AAG
  source 1..20: mol_type = other DNA
aacaaatggagatgactact

SEQ ID NO: 9702 - DNA, 20 bp, synthetic construct
  misc_feature 1..20: note = Description of Artificial Sequence: Synthetic oligonucleotide
  misc_feature 1..20: note = Target: ANGPTL3; (+) strand; PAM type: NRG; PAM sequence: GAG
  source 1..20: mol_type = other DNA
agtcacattgactttaacat

SEQ ID NO: 9703 - DNA, 20 bp, synthetic construct
  misc_feature 1..20: note = Description of Artificial Sequence: Synthetic oligonucleotide
  misc_feature 1..20: note = Target: ANGPTL3; (+) strand; PAM type: NRG; PAM sequence: AGG
  source 1..20: mol_type = other DNA
gtcacattgactttaacatg

SEQ ID NO: 9704 - DNA, 20 bp, synthetic construct
  misc_feature 1..20: note = Description of Artificial Sequence: Synthetic oligonucleotide
  misc_feature 1..20: note = Target: ANGPTL3; (+) strand; PAM type: NRG; PAM sequence: AAG
  source 1..20: mol_type = other DNA
tatgaaaacaaataattgta

SEQ ID NO: 9705 - DNA, 20 bp, synthetic construct
  misc_feature 1..20: note = Description of Artificial Sequence: Synthetic oligonucleotide
  misc_feature 1..20: note = Target: ANGPTL3; (+) strand; PAM type: NRG; PAM sequence: AGG
  source 1..20: mol_type = other DNA
atgaaaacaaataattgtaa

SEQ ID NO: 9706 - DNA, 20 bp, synthetic construct
  misc_feature 1..20: note = Description of Artificial Sequence: Synthetic oligonucleotide
  misc_feature 1..20: note = Target: ANGPTL3; (+) strand; PAM type: NRG; PAM sequence: CAG
  source 1..20: mol_type = other DNA
taattgtaaaggaatcttgt

SEQ ID NO: 9707 - DNA, 20 bp, synthetic construct
  misc_feature 1..20: note = Description of Artificial Sequence: Synthetic oligonucleotide
  misc_feature 1..20: note = Target: ANGPTL3; (+) strand; PAM type: NRG; PAM sequence: CAG
  source 1..20: mol_type = other DNA
aaaggaatcttgtcagatta

SEQ ID NO: 9708 - DNA, 20 bp, synthetic construct
  misc_feature 1..20: note = Description of Artificial Sequence: Synthetic oligonucleotide
  misc_feature 1..20: note = Target: ANGPTL3; (+) strand; PAM type: NRG; PAM sequence: AAG
  source 1..20: mol_type = other DNA
gaatcttgtcagattacagt

SEQ ID NO: 9709 - DNA, 20 bp, synthetic construct
  misc_feature 1..20: note = Description of Artificial Sequence: Synthetic oligonucleotide
  misc_feature 1..20: note = Target: ANGPTL3; (+) strand; PAM type: NRG; PAM sequence: TGG
  source 1..20: mol_type = other DNA
agtaagaatgaacatatttg

SEQ ID NO: 9710 - DNA, 20 bp, synthetic construct
  misc_feature 1..20: note = Description of Artificial Sequence: Synthetic oligonucleotide
  misc_feature 1..20: note = Target: ANGPTL3; (+) strand; PAM type: NRG; PAM sequence: GAG
  source 1..20: mol_type = other DNA
atgaacatatttgtggcatc

SEQ ID NO: 9711 - DNA, 20 bp, synthetic construct
  misc_feature 1..20: note = Description of Artificial Sequence: Synthetic oligonucleotide
  misc_feature 1..20: note = Target: ANGPTL3; (+) strand; PAM type: NRG; PAM sequence: AAG
  source 1..20: mol_type = other DNA
atatttgtggcatcgagtta

SEQ ID NO: 9712 - DNA, 20 bp, synthetic construct
  misc_feature 1..20: note = Description of Artificial Sequence: Synthetic oligonucleotide
  misc_feature 1..20: note = Target: ANGPTL3; (+) strand; PAM type: NRG; PAM sequence: TAG
  source 1..20: mol_type = other DNA
gtgattctaatacattcgtg

SEQ ID NO: 9713 - DNA, 20 bp, synthetic construct
  misc_feature 1..20: note = Description of Artificial Sequence: Synthetic oligonucleotide
  misc_feature 1..20: note = Target: ANGPTL3; (+) strand; PAM type: NRG; PAM sequence: AGG
  source 1..20: mol_type = other DNA
tgattctaatacattcgtgt

SEQ ID NO: 9714 - DNA, 20 bp, synthetic construct
  misc_feature 1..20: note = Description of Artificial Sequence: Synthetic oligonucleotide
  misc_feature 1..20: note = Target: ANGPTL3; (+) strand; PAM type: NRG; PAM sequence: AAG
  source 1..20: mol_type = other DNA
atacattcgtgtaggttttc

SEQ ID NO: 9715 - DNA, 20 bp, synthetic construct
  misc_feature 1..20: note = Description of Artificial Sequence: Synthetic oligonucleotide
  misc_feature 1..20: note = Target: ANGPTL3; (+) strand; PAM type: NRG; PAM sequence: TAG
  source 1..20: mol_type = other DNA
cattcgtgtaggttttcaag

SEQ ID NO: 9716 - DNA, 20 bp, synthetic construct
  misc_feature 1..20: note = Description of Artificial Sequence: Synthetic oligonucleotide
  misc_feature 1..20: note = Target: ANGPTL3; (+) strand; PAM type: NRG; PAM sequence: AAG
  source 1..20: mol_type = other DNA
gtagaaataaacctcgtaac

SEQ ID NO: 9717 - DNA, 20 bp, synthetic construct
  misc_feature 1..20: note = Description of Artificial Sequence: Synthetic oligonucleotide
  misc_feature 1..20: note = Target: ANGPTL3; (+) strand; PAM type: NRG; PAM sequence: CAG
  source 1..20: mol_type = other DNA
caagttactgaacgtttaaa

SEQ ID NO: 9718 - DNA, 20 bp, synthetic construct
  misc_feature 1..20: note = Description of Artificial Sequence: Synthetic oligonucleotide
  misc_feature 1..20: note = Target: ANGPTL3; (+) strand; PAM type: NRG; PAM sequence: AAG
  source 1..20: mol_type = other DNA
gaacgtttaaacagcctgac

SEQ ID NO: 9719 - DNA, 20 bp, synthetic construct
  misc_feature 1..20: note = Description of Artificial Sequence: Synthetic oligonucleotide
  misc_feature 1..20: note = Target: ANGPTL3; (+) strand; PAM type: NRG; PAM sequence: AAG
  source 1..20: mol_type = other DNA
tgtttaaaattcaataaaca

SEQ ID NO: 9720 - DNA, 20 bp, synthetic construct
  misc_feature 1..20: note = Description of Artificial Sequence: Synthetic oligonucleotide
  misc_feature 1..20: note = Target: ANGPTL3; (+) strand; PAM type: NRG; PAM sequence: CAG
  source 1..20: mol_type = other DNA
aaattcaataaacaaagacc

SEQ ID NO: 9721 - DNA, 20 bp, synthetic construct
  misc_feature 1..20: note = Description of Artificial Sequence: Synthetic oligonucleotide
  misc_feature 1..20: note = Target: ANGPTL3; (+) strand; PAM type: NRG; PAM sequence: TAG
  source 1..20: mol_type = other DNA
aagacccagtccctaaatta

SEQ ID NO: 9722 - DNA, 20 bp, synthetic construct
  misc_feature 1..20: note = Description of Artificial Sequence: Synthetic oligonucleotide
  misc_feature 1..20: note = Target: ANGPTL3; (+) strand; PAM type: NRG; PAM sequence: CAG
  source 1..20: mol_type = other DNA
catgtttatcgacatcacaa

SEQ ID NO: 9723 - DNA, 20 bp, synthetic construct
  misc_feature 1..20: note = Description of Artificial Sequence: Synthetic oligonucleotide
  misc_feature 1..20: note = Target: ANGPTL3; (+) strand; PAM type: NRG; PAM sequence: AAG
  source 1..20: mol_type = other DNA
cctaaatccctaaatcccta

SEQ ID NO: 9724 - DNA, 20 bp, synthetic construct
  misc_feature 1..20: note = Description of Artificial Sequence: Synthetic oligonucleotide
  misc_feature 1..20: note = Target: ANGPTL3; (+) strand; PAM type: NRG; PAM sequence: TAG
  source 1..20: mol_type = other DNA
atccctaaatccctaaagat

SEQ ID NO: 9725 - DNA, 20 bp, synthetic construct
  misc_feature 1..20: note = Description of Artificial Sequence: Synthetic oligonucleotide
  misc_feature 1..20: note = Target: ANGPTL3; (+) strand; PAM type: NRG; PAM sequence: CAG
  source 1..20: mol_type = other DNA
tagatacaaattttttacca

SEQ ID NO: 9726 - DNA, 20 bp, synthetic construct
  misc_feature 1..20: note = Description of Artificial Sequence: Synthetic oligonucleotide
  misc_feature 1..20: note = Target: ANGPTL3; (+) strand; PAM type: NRG; PAM sequence: CAG
  source 1..20: mol_type = other DNA
tttaccacagtatcacttgt

SEQ ID NO: 9727 - DNA, 20 bp, synthetic construct
  misc_feature 1..20: note = Description of Artificial Sequence: Synthetic oligonucleotide
  misc_feature 1..20: note = Target: ANGPTL3; (+) strand; PAM type: NRG; PAM sequence: CAG
  source 1..20: mol_type = other DNA
atatgattttttaaaactgc

SEQ ID NO: 9728 - DNA, 20 bp, synthetic construct
  misc_feature 1..20: note = Description of Artificial Sequence: Synthetic oligonucleotide
  misc_feature 1..20: note = Target: ANGPTL3; (+) strand; PAM type: NRG; PAM sequence: AAG
  source 1..20: mol_type = other DNA
gattttttaaaactgccagt

SEQ ID NO: 9729 - DNA, 20 bp, synthetic construct
  misc_feature 1..20: note = Description of Artificial Sequence: Synthetic oligonucleotide
  misc_feature 1..20: note = Target: ANGPTL3; (+) strand; PAM type: NRG; PAM sequence: AAG
  source 1..20: mol_type = other DNA
taaattaaacccatttgtta

SEQ ID NO: 9730 - DNA, 20 bp, synthetic construct
  misc_feature 1..20: note = Description of Artificial Sequence: Synthetic oligonucleotide
  misc_feature 1..20: note = Target: ANGPTL3; (+) strand; PAM type: NRG; PAM sequence: AGG
  source 1..20: mol_type = other DNA
aaattaaacccatttgttaa

SEQ ID NO: 9731 - DNA, 20 bp, synthetic construct
  misc_feature 1..20: note = Description of Artificial Sequence: Synthetic oligonucleotide
  misc_feature 1..20: note = Target: ANGPTL3; (+) strand; PAM type: NRG; PAM sequence: TAG
  source 1..20: mol_type = other DNA
aacccatttgttaaaggata

SEQ ID NO: 9732 - DNA, 20 bp, synthetic construct
  misc_feature 1..20: note = Description of Artificial Sequence: Synthetic oligonucleotide
  misc_feature 1..20: note = Target: ANGPTL3; (+) strand; PAM type: NRG; PAM sequence: AAG
  source 1..20: mol_type = other DNA
tgttaaaggatatagtgccc

SEQ ID NO: 9733 - DNA, 20 bp, synthetic construct
  misc_feature 1..20: note = Description of Artificial Sequence: Synthetic oligonucleotide
  misc_feature 1..20: note = Target: ANGPTL3; (+) strand; PAM type: NRG; PAM sequence: TGG
  source 1..20: mol_type = other DNA
gatatagtgcccaagttata

SEQ ID NO: 9734 - DNA, 20 bp, synthetic construct
  misc_feature 1..20: note = Description of Artificial Sequence: Synthetic oligonucleotide
  misc_feature 1..20: note = Target: ANGPTL3; (+) strand; PAM type: NRG; PAM sequence: TAG
  source 1..20: mol_type = other DNA
gacctacctttgtcaatact

SEQ ID NO: 9735 - DNA, 20 bp, synthetic construct
  misc_feature 1..20: note = Description of Artificial Sequence: Synthetic oligonucleotide
  misc_feature 1..20: note = Target: ANGPTL3; (+) strand; PAM type: NRG; PAM sequence: AAG
  source 1..20: mol_type = other DNA
tttatatgtcacatatataa

SEQ ID NO: 9736 - DNA, 20 bp, synthetic construct
  misc_feature 1..20: note = Description of Artificial Sequence: Synthetic oligonucleotide
  misc_feature 1..20: note = Target: ANGPTL3; (+) strand; PAM type: NRG; PAM sequence: AAG
  source 1..20: mol_type = other DNA
gtatgatctatgtgaatcct

SEQ ID NO: 9737 - DNA, 20 bp, synthetic construct
  misc_feature 1..20: note = Description of Artificial Sequence: Synthetic oligonucleotide
  misc_feature 1..20: note = Target: ANGPTL3; (+) strand; PAM type: NRG; PAM sequence: CAG
  source 1..20: mol_type = other DNA
cctaagtaaatattttgttc

SEQ ID NO: 9738 - DNA, 20 bp, synthetic construct
  misc_feature 1..20: note = Description of Artificial Sequence: Synthetic oligonucleotide
  misc_feature 1..20: note = Target: ANGPTL3; (+) strand; PAM type: NRG; PAM sequence: AAG
  source 1..20: mol_type = other DNA
gtaaatattttgttccagaa

SEQ ID NO: 9739 - DNA, 20 bp, synthetic construct
  misc_feature 1..20: note = Description of Artificial Sequence: Synthetic oligonucleotide
  misc_feature 1..20: note = Target: ANGPTL3; (+) strand; PAM type: NRG; PAM sequence: AAG
  source 1..20: mol_type = other DNA
cagaaaagtacaaaataata

SEQ ID NO: 9740 - DNA, 20 bp, synthetic construct
  misc_feature 1..20: note = Description of Artificial Sequence: Synthetic oligonucleotide
  misc_feature 1..20: note = Target: ANGPTL3; (+) strand; PAM type: NRG; PAM sequence: AGG
  source 1..20: mol_type = other DNA
agaaaagtacaaaataataa

SEQ ID NO: 9741 - DNA, 20 bp, synthetic construct
  misc_feature 1..20: note = Description of Artificial Sequence: Synthetic oligonucleotide
  misc_feature 1..20: note = Target: ANGPTL3; (+) strand; PAM type: NRG; PAM sequence: CAG
  source 1..20: mol_type = other DNA
taaaaataatctataatttt

SEQ ID NO: 9742 - DNA, 20 bp, synthetic construct
  misc_feature 1..20: note = Description of Artificial Sequence: Synthetic oligonucleotide
  misc_feature 1..20: note = Target: ANGPTL3; (+) strand; PAM type: NRG; PAM sequence: AGG
  source 1..20: mol_type = other DNA
aaaaataatctataattttc

SEQ ID NO: 9743 - DNA, 20 bp, synthetic construct
  misc_feature 1..20: note = Description of Artificial Sequence: Synthetic oligonucleotide
  misc_feature 1..20: note = Target: ANGPTL3; (+) strand; PAM type: NRG; PAM sequence: CAG
  source 1..20: mol_type = other DNA
atctataattttcaggacca

SEQ ID NO: 9744 - DNA, 20 bp, synthetic construct
  misc_feature 1..20: note = Description of Artificial Sequence: Synthetic oligonucleotide
  misc_feature 1..20: note = Target: ANGPTL3; (+) strand; PAM type: NRG; PAM sequence: AAG
  source 1..20: mol_type = other DNA
aattttcaggaccacagact

SEQ ID NO: 9745 - DNA, 20 bp, synthetic construct
  misc_feature 1..20: note = Description of Artificial Sequence: Synthetic oligonucleotide
  misc_feature 1..20: note = Target: ANGPTL3; (+) strand; PAM type: NRG; PAM sequence: TAG
  source 1..20: mol_type = other DNA
gaaattaacgctgatttttt

SEQ ID NO: 9746 - DNA, 20 bp, synthetic construct
  misc_feature 1..20: note = Description of Artificial Sequence: Synthetic oligonucleotide
  misc_feature 1..20: note = Target: ANGPTL3; (+) strand; PAM type: NRG; PAM sequence: AGG
  source 1..20: mol_type = other DNA
aaattaacgctgattttttt

SEQ ID NO: 9747 - DNA, 20 bp, synthetic construct
  misc_feature 1..20: note = Description of Artificial Sequence: Synthetic oligonucleotide
  misc_feature 1..20: note = Target: ANGPTL3; (+) strand; PAM type: NRG; PAM sequence: GGG
  source 1..20: mol_type = other DNA
aattaacgctgattttttta

SEQ ID NO: 9748 - DNA, 20 bp, synthetic construct
  misc_feature 1..20: note = Description of Artificial Sequence: Synthetic oligonucleotide
  misc_feature 1..20: note = Target: ANGPTL3; (+) strand; PAM type: NRG; PAM sequence: CAG
  source 1..20: mol_type = other DNA
aacgctgatttttttagggc

SEQ ID NO: 9749 - DNA, 20 bp, synthetic construct
  misc_feature 1..20: note = Description of Artificial Sequence: Synthetic oligonucleotide
  misc_feature 1..20: note = Target: ANGPTL3; (+) strand; PAM type: NRG; PAM sequence: TGG
  source 1..20: mol_type = other DNA
ttagggccagaataccaaaa

SEQ ID NO: 9750 - DNA, 20 bp, synthetic construct
  misc_feature 1..20: note = Description of Artificial Sequence: Synthetic oligonucleotide
  misc_feature 1..20: note = Target: ANGPTL3; (+) strand; PAM type: NRG; PAM sequence: TGG
  source 1..20: mol_type = other DNA
ctcctctcttcccccaaaat

SEQ ID NO: 9751 - DNA, 20 bp, synthetic construct
  misc_feature 1..20: note = Description of Artificial Sequence: Synthetic oligonucleotide
  misc_feature 1..20: note = Target: ANGPTL3; (+) strand; PAM type: NRG; PAM sequence: GAG
  source 1..20: mol_type = other DNA
taattcattatttaatatat

SEQ ID NO: 9752 - DNA, 20 bp, synthetic construct
  misc_feature 1..20: note = Description of Artificial Sequence: Synthetic oligonucleotide
  misc_feature 1..20: note = Target: ANGPTL3; (+) strand; PAM type: NRG; PAM sequence: TGG
  source 1..20: mol_type = other DNA
tatgagttgcttcctctatt

SEQ ID NO: 9753 - DNA, 20 bp, synthetic construct
  misc_feature 1..20: note = Description of Artificial Sequence: Synthetic oligonucleotide
  misc_feature 1..20: note = Target: ANGPTL3; (+) strand; PAM type: NRG; PAM sequence: TAG
  source 1..20: mol_type = other DNA
aaaaaaaaaaaaaactctca

SEQ ID NO: 9754 - DNA, 20 bp, synthetic construct
  misc_feature 1..20: note = Description of Artificial Sequence: Synthetic oligonucleotide
  misc_feature 1..20: note = Target: ANGPTL3; (+) strand; PAM type: NRG; PAM sequence: AGG
  source 1..20: mol_type = other DNA
aaaaaaaaaaaaactctcat

SEQ ID NO: 9755 - DNA, 20 bp, synthetic construct
  misc_feature 1..20: note = Description of Artificial Sequence: Synthetic oligonucleotide
  misc_feature 1..20: note = Target: ANGPTL3; (+) strand; PAM type: NRG; PAM sequence: CAG
  source 1..20: mol_type = other DNA
atgtttcattttgttccttt

SEQ ID NO: 9756 - DNA, 20 bp, synthetic construct
  misc_feature 1..20: note = Description of Artificial Sequence: Synthetic oligonucleotide
  misc_feature 1..20: note = Target: ANGPTL3; (+) strand; PAM type: NRG; PAM sequence: AGG
  source 1..20: mol_type = other DNA
tgtttcattttgttcctttc

SEQ ID NO: 9757 - DNA, 20 bp, synthetic construct
  misc_feature 1..20: note = Description of Artificial Sequence: Synthetic oligonucleotide
  misc_feature 1..20: note = Target: ANGPTL3; (+) strand; PAM type: NRG; PAM sequence: GAG
  source 1..20: mol_type = other DNA
tttcattttgttcctttcag

SEQ ID NO: 9758 - DNA, 20 bp, synthetic construct
  misc_feature 1..20: note = Description of Artificial Sequence: Synthetic oligonucleotide
  misc_feature 1..20: note = Target: ANGPTL3; (+) strand; PAM type: NRG; PAM sequence: TAG
  source 1..20: mol_type = other DNA
cattttgttcctttcaggag

SEQ ID NO: 9759 - DNA, 20 bp, synthetic construct
  misc_feature 1..20: note = Description of Artificial Sequence: Synthetic oligonucleotide
  misc_feature 1..20: note = Target: ANGPTL3; (+) strand; PAM type: NRG; PAM sequence: TAG
  source 1..20: mol_type = other DNA
tcctttcaggagtagtaaat

SEQ ID NO: 9760 - DNA, 20 bp, synthetic construct
  misc_feature 1..20: note = Description of Artificial Sequence: Synthetic oligonucleotide
  misc_feature 1..20: note = Target: ANGPTL3; (+) strand; PAM type: NRG; PAM sequence: AAG
  source 1..20: mol_type = other DNA
ttagacgttttccccatata

SEQ ID NO: 9761 - DNA, 20 bp, synthetic construct
  misc_feature 1..20: note = Description of Artificial Sequence: Synthetic oligonucleotide
  misc_feature 1..20: note = Target: ANGPTL3; (+) strand; PAM type: NRG; PAM sequence: CAG
  source 1..20: mol_type = other DNA
catataaagcttttttctac

SEQ ID NO: 9762 - DNA, 20 bp, synthetic construct
  misc_feature 1..20: note = Description of Artificial Sequence: Synthetic oligonucleotide
  misc_feature 1..20: note = Target: ANGPTL3; (+) strand; PAM type: NRG; PAM sequence: AAG
  source 1..20: mol_type = other DNA
taaagcttttttctaccaga

SEQ ID NO: 9763 - DNA, 20 bp, synthetic construct
  misc_feature 1..20: note = Description of Artificial Sequence: Synthetic oligonucleotide
  misc_feature 1..20: note = Target: ANGPTL3; (+) strand; PAM type: NRG; PAM sequence: TGG
  source 1..20: mol_type = other DNA
ttctaccagaaagatacttc

SEQ ID NO: 9764 - DNA, 20 bp, synthetic construct
  misc_feature 1..20: note = Description of Artificial Sequence: Synthetic oligonucleotide
  misc_feature 1..20: note = Target: ANGPTL3; (+) strand; PAM type: NRG; PAM sequence: TAG
  source 1..20: mol_type = other DNA
taccagaaagatacttctgg

SEQ ID NO: 9765 - DNA, 20 bp, synthetic construct
  misc_feature 1..20: note = Description of Artificial Sequence: Synthetic oligonucleotide
  misc_feature 1..20: note = Target: ANGPTL3; (+) strand; PAM type: NRG; PAM sequence: AAG
  source 1..20: mol_type = other DNA
cagaaagatacttctggtag

SEQ ID NO: 9766 - DNA, 20 bp, synthetic construct
  misc_feature 1..20: note = Description of Artificial Sequence: Synthetic oligonucleotide
  misc_feature 1..20: note = Target: ANGPTL3; (+) strand; PAM type: NRG; PAM sequence: AAG
  source 1..20: mol_type = other DNA
aaagatacttctggtagaag

SEQ ID NO: 9767 - DNA, 20 bp, synthetic construct
  misc_feature 1..20: note = Description of Artificial Sequence: Synthetic oligonucleotide
  misc_feature 1..20: note = Target: ANGPTL3; (+) strand; PAM type: NRG; PAM sequence: GAG
  source 1..20: mol_type = other DNA
agatacttctggtagaagaa

SEQ ID NO: 9768 - DNA, 20 bp, synthetic construct
  misc_feature 1..20: note = Description of Artificial Sequence: Synthetic oligonucleotide
  misc_feature 1..20: note = Target: ANGPTL3; (+) strand; PAM type: NRG; PAM sequence: AAG
  source 1..20: mol_type = other DNA
acttctggtagaagaagaga

SEQ ID NO: 9769 - DNA, 20 bp, synthetic construct
  misc_feature 1..20: note = Description of Artificial Sequence: Synthetic oligonucleotide
  misc_feature 1..20: note = Target: ANGPTL3; (+) strand; PAM type: NRG; PAM sequence: AGG
  source 1..20: mol_type = other DNA
cttctggtagaagaagagaa

SEQ ID NO: 9770 - DNA, 20 bp, synthetic construct
  misc_feature 1..20: note = Description of Artificial Sequence: Synthetic oligonucleotide
  misc_feature 1..20: note = Target: ANGPTL3; (+) strand; PAM type: NRG; PAM sequence: GAG
  source 1..20: mol_type = other DNA
tctggtagaagaagagaaag

SEQ ID NO: 9771 - DNA, 20 bp, synthetic construct
  misc_feature 1..20: note = Description of Artificial Sequence: Synthetic oligonucleotide
  misc_feature 1..20: note = Target: ANGPTL3; (+) strand; PAM type: NRG; PAM sequence: TGG
  source 1..20: mol_type = other DNA
gaagagaaaggagctcttta

SEQ ID NO: 9772 - DNA, 20 bp, synthetic construct
  misc_feature 1..20: note = Description of Artificial Sequence: Synthetic oligonucleotide
  misc_feature 1..20: note = Target: ANGPTL3; (+) strand; PAM type: NRG; PAM sequence: AAG
  source 1..20: mol_type = other DNA
tgtcctaactactttgctta

SEQ ID NO: 9773 - DNA, 20 bp, synthetic construct
  misc_feature 1..20: note = Description of Artificial Sequence: Synthetic oligonucleotide
  misc_feature 1..20: note = Target: ANGPTL3; (+) strand; PAM type: NRG; PAM sequence: CAG
  source 1..20: mol_type = other DNA
tcaaattccatcactactca

SEQ ID NO: 9774 - DNA, 20 bp, synthetic construct
  misc_feature 1..20: note = Description of Artificial Sequence: Synthetic oligonucleotide
  misc_feature 1..20: note = Target: ANGPTL3; (+) strand; PAM type: NRG; PAM sequence: AAG
  source 1..20: mol_type = other DNA
tactcacagttgtctaatct

SEQ ID NO: 9775 - DNA, 20 bp, synthetic construct
  misc_feature 1..20: note = Description of Artificial Sequence: Synthetic oligonucleotide
  misc_feature 1..20: note = Target: ANGPTL3; (+) strand; PAM type: NRG; PAM sequence: CAG
  source 1..20: mol_type = other DNA
tctaatcccctttgatctct

SEQ ID NO: 9776 - DNA, 20 bp, synthetic construct
  misc_feature 1..20: note = Description of Artificial Sequence: Synthetic oligonucleotide
  misc_feature 1..20: note = Target: ANGPTL3; (+) strand; PAM type: NRG; PAM sequence: AAG
  source 1..20: mol_type = other DNA
tctctctactacttaataat

SEQ ID NO: 9777 - DNA, 20 bp, synthetic construct
  misc_feature 1..20: note = Description of Artificial Sequence: Synthetic oligonucleotide
  misc_feature 1..20: note = Target: ANGPTL3; (+) strand; PAM type: NRG; PAM sequence: TGG
  source 1..20: mol_type = other DNA
tcacaatactatactctcca

SEQ ID NO: 9778 - DNA, 20 bp, synthetic construct
  misc_feature 1..20: note = Description of Artificial Sequence: Synthetic oligonucleotide
  misc_feature 1..20: note = Target: ANGPTL3; (+) strand; PAM type: NRG; PAM sequence: TAG
  source 1..20: mol_type = other DNA
ccctattcctttctcatatt

SEQ ID NO: 9779 - DNA, 20 bp, synthetic construct
  misc_feature 1..20: note = Description of Artificial Sequence: Synthetic oligonucleotide
  misc_feature 1..20: note = Target: ANGPTL3; (+) strand; PAM type: NRG; PAM sequence: TGG
  source 1..20: mol_type = other DNA
ctttctcatatttagtactg

SEQ ID NO: 9780 - DNA, 20 bp, synthetic construct
  misc_feature 1..20: note = Description of Artificial Sequence: Synthetic oligonucleotide
  misc_feature 1..20: note = Target: ANGPTL3; (+) strand; PAM type: NRG; PAM sequence: GGG
  source 1..20: mol_type = other DNA
tttctcatatttagtactgt

SEQ ID NO: 9781 - DNA, 20 bp, synthetic construct
  misc_feature 1..20: note = Description of Artificial Sequence: Synthetic oligonucleotide
  misc_feature 1..20: note = Target: ANGPTL3; (+) strand; PAM type: NRG; PAM sequence: TGG
  source 1..20: mol_type = other DNA
tatttagtactgtgggccaa

SEQ ID NO: 9782 - DNA, 20 bp, synthetic construct
  misc_feature 1..20: note = Description of Artificial Sequence: Synthetic oligonucleotide
  misc_feature 1..20: note = Target: ANGPTL3; (+) strand; PAM type: NRG; PAM sequence: CAG
  source 1..20: mol_type = other DNA
atcttttctacactgaccct

SEQ ID NO: 9783 - DNA, 20 bp, synthetic construct
  misc_feature 1..20: note = Description of Artificial Sequence: Synthetic oligonucleotide
  misc_feature 1..20: note = Target: ANGPTL3; (+) strand; PAM type: NRG; PAM sequence: CGG
  source 1..20: mol_type = other DNA
agacattctatctgctctca

SEQ ID NO: 9784 - DNA, 20 bp, synthetic construct
  misc_feature 1..20: note = Description of Artificial Sequence: Synthetic oligonucleotide
  misc_feature 1..20: note = Target: ANGPTL3; (+) strand; PAM type: NRG; PAM sequence: AAG
  source 1..20: mol_type = other DNA
tcctttatttaccatgaata

SEQ ID NO: 9785 - DNA, 20 bp, synthetic construct
  misc_feature 1..20: note = Description of Artificial Sequence: Synthetic oligonucleotide
  misc_feature 1..20: note = Target: ANGPTL3; (+) strand; PAM type: NRG; PAM sequence: AAG
  source 1..20: mol_type = other DNA
aaaatctacatattcatccc

SEQ ID NO: 9786 - DNA, 20 bp, synthetic construct
  misc_feature 1..20: note = Description of Artificial Sequence: Synthetic oligonucleotide
  misc_feature 1..20: note = Target: ANGPTL3; (+) strand; PAM type: NRG; PAM sequence: CAG
  source 1..20: mol_type = other DNA
attcatcccaagtctctttc

SEQ ID NO: 9787 - DNA, 20 bp, synthetic construct
  misc_feature 1..20: note = Description of Artificial Sequence: Synthetic oligonucleotide
  misc_feature 1..20: note = Target: ANGPTL3; (+) strand; PAM type: NRG; PAM sequence: AAG
  source 1..20: mol_type = other DNA
attcaacataccaaaaataa

SEQ ID NO: 9788 - DNA, 20 bp, synthetic construct
  misc_feature 1..20: note = Description of Artificial Sequence: Synthetic oligonucleotide
  misc_feature 1..20: note = Target: ANGPTL3; (+) strand; PAM type: NRG; PAM sequence: AGG
  source 1..20: mol_type = other DNA
ttcaacataccaaaaataaa

SEQ ID NO: 9789 - DNA, 20 bp, synthetic construct
  misc_feature 1..20: note = Description of Artificial Sequence: Synthetic oligonucleotide
  misc_feature 1..20: note = Target: ANGPTL3; (+) strand; PAM type: NRG; PAM sequence: CAG
  source 1..20: mol_type = other DNA
acataccaaaaataaaaggc

SEQ ID NO: 9790 - DNA, 20 bp, synthetic construct
  misc_feature 1..20: note = Description of Artificial Sequence: Synthetic oligonucleotide
  misc_feature 1..20: note = Target: ANGPTL3; (+) strand; PAM type: NRG; PAM sequence: AGG
  source 1..20: mol_type = other DNA
cataccaaaaataaaaggcc

SEQ ID NO: 9791 - DNA, 20 bp, synthetic construct
  misc_feature 1..20: note = Description of Artificial Sequence: Synthetic oligonucleotide
  misc_feature 1..20: note = Target: ANGPTL3; (+) strand; PAM type: NRG; PAM sequence: CGG
  source 1..20: mol_type = other DNA
caaaaataaaaggccaggca

SEQ ID NO: 9792 - DNA, 20 bp, synthetic construct
  misc_feature 1..20: note = Description of Artificial Sequence: Synthetic oligonucleotide
  misc_feature 1..20: note = Target: ANGPTL3; (+) strand; PAM type: NRG; PAM sequence: TGG
  source 1..20: mol_type = other DNA
aaataaaaggccaggcacgg

SEQ ID NO: 9793 - DNA, 20 bp, synthetic construct
  misc_feature 1..20: note = Description of Artificial Sequence: Synthetic oligonucleotide
  misc_feature 1..20: note = Target: ANGPTL3; (+) strand; PAM type: NRG; PAM sequence: CAG
  source 1..20: mol_type = other DNA
gtggctcacacctgtaatcc

SEQ ID NO: 9794 - DNA, 20 bp, synthetic construct
  misc_feature 1..20: note = Description of Artificial Sequence: Synthetic oligonucleotide
  misc_feature 1..20: note = Target: ANGPTL3; (+) strand; PAM type: NRG; PAM sequence: AGG
  source 1..20: mol_type = other DNA
tggctcacacctgtaatccc

SEQ ID NO: 9795 - DNA, 20 bp, synthetic construct
  misc_feature 1..20: note = Description of Artificial Sequence: Synthetic oligonucleotide
  misc_feature 1..20: note = Target: ANGPTL3; (+) strand; PAM type: NRG; PAM sequence: TGG
  source 1..20: mol_type = other DNA
cacctgtaatcccaggactt

SEQ ID NO: 9796 - DNA, 20 bp, synthetic construct
  misc_feature 1..20: note = Description of Artificial Sequence: Synthetic oligonucleotide
  misc_feature 1..20: note = Target: ANGPTL3; (+) strand; PAM type: NRG; PAM sequence: GGG
  source 1..20: mol_type = other DNA
acctgtaatcccaggacttt

SEQ ID NO: 9797 - DNA, 20 bp, synthetic construct
  misc_feature 1..20: note = Description of Artificial Sequence: Synthetic oligonucleotide
  misc_feature 1..20: note = Target: ANGPTL3; (+) strand; PAM type: NRG; PAM sequence: GAG
  source 1..20: mol_type = other DNA
ctgtaatcccaggactttgg

SEQ ID NO: 9798 - DNA, 20 bp, synthetic construct
  misc_feature 1..20: note = Description of Artificial Sequence: Synthetic oligonucleotide
  misc_feature 1..20: note = Target: ANGPTL3; (+) strand; PAM type: NRG; PAM sequence: AGG
  source 1..20: mol_type = other DNA
tgtaatcccaggactttggg

SEQ ID NO: 9799 - DNA, 20 bp, synthetic construct
  misc_feature 1..20: note = Description of Artificial Sequence: Synthetic oligonucleotide
  misc_feature 1..20: note = Target: ANGPTL3; (+) strand; PAM type: NRG; PAM sequence: GAG
  source 1..20: mol_type = other DNA
tcccaggactttgggaggct

SEQ ID NO: 9800 - DNA, 20 bp, synthetic construct
  misc_feature 1..20: note = Description of Artificial Sequence: Synthetic oligonucleotide
  misc_feature 1..20: note = Target: ANGPTL3; (+) strand; PAM type: NRG; PAM sequence: AGG
  source 1..20: mol_type = other DNA
cccaggactttgggaggctg

SEQ ID NO: 9801 - DNA, 20 bp, synthetic construct
  misc_feature 1..20: note = Description of Artificial Sequence: Synthetic oligonucleotide
  misc_feature 1..20: note = Target: ANGPTL3; (+) strand; PAM type: NRG; PAM sequence: CAG
  source 1..20: mol_type = other DNA
aggactttgggaggctgagg

SEQ ID NO: 9802 - DNA, 20 bp, synthetic construct
  misc_feature 1..20: note = Description of Artificial Sequence: Synthetic oligonucleotide
  misc_feature 1..20: note = Target: ANGPTL3; (+) strand; PAM type: NRG; PAM sequence: AGG
  source 1..20: mol_type = other DNA
ggactttgggaggctgaggc

SEQ ID NO: 9803 - DNA, 20 bp, synthetic construct
  misc_feature 1..20: note = Description of Artificial Sequence: Synthetic oligonucleotide
  misc_feature 1..20: note = Target: ANGPTL3; (+) strand; PAM type: NRG; PAM sequence: TGG
  source 1..20: mol_type = other DNA
ctttgggaggctgaggcagg

SEQ ID NO: 9804 - DNA, 20 bp, synthetic construct
  misc_feature 1..20: note = Description of Artificial Sequence: Synthetic oligonucleotide
  misc_feature 1..20: note = Target: ANGPTL3; (+) strand; PAM type: NRG; PAM sequence: GAG
  source 1..20: mol_type = other DNA
ctgaggcaggtggatcacct

SEQ ID NO: 9805 - DNA, 20 bp, synthetic construct
  misc_feature 1..20: note = Description of Artificial Sequence: Synthetic oligonucleotide
  misc_feature 1..20: note = Target: ANGPTL3; (+) strand; PAM type: NRG; PAM sequence: AGG
  source 1..20: mol_type = other DNA
tgaggcaggtggatcacctg

SEQ ID NO: 9806 - DNA, 20 bp, synthetic construct
  misc_feature 1..20: note = Description of Artificial Sequence: Synthetic oligonucleotide
  misc_feature 1..20: note = Target: ANGPTL3; (+) strand; PAM type: NRG; PAM sequence: CAG
  source 1..20: mol_type = other DNA
gcaggtggatcacctgaggt

SEQ ID NO: 9807 - DNA, 20 bp, synthetic construct
  misc_feature 1..20: note = Description of Artificial Sequence: Synthetic oligonucleotide
  misc_feature 1..20: note = Target: ANGPTL3; (+) strand; PAM type: NRG; PAM sequence: AGG
  source 1..20: mol_type = other DNA
caggtggatcacctgaggtc

SEQ ID NO: 9808 - DNA, 20 bp, synthetic construct
  misc_feature 1..20: note = Description of Artificial Sequence: Synthetic oligonucleotide
  misc_feature 1..20: note = Target: ANGPTL3; (+) strand; PAM type: NRG; PAM sequence: GAG
  source 1..20: mol_type = other DNA
ggtggatcacctgaggtcag

SEQ ID NO: 9809 - DNA, 20 bp, synthetic construct
  misc_feature 1..20: note = Description of Artificial Sequence: Synthetic oligonucleotide
  misc_feature 1..20: note = Target: ANGPTL3; (+) strand; PAM type: NRG; PAM sequence: CAG
  source 1..20: mol_type = other DNA
cctgaggtcaggagtctgac

SEQ ID NO: 9810 - DNA, 20 bp, synthetic construct
  misc_feature 1..20: note = Description of Artificial Sequence: Synthetic oligonucleotide
  misc_feature 1..20: note = Target: ANGPTL3; (+) strand; PAM type: NRG; PAM sequence: TGG
  source 1..20: mol_type = other DNA
tctgaccagcctgaccaata

SEQ ID NO: 9811 - DNA, 20 bp, synthetic construct
  misc_feature 1..20: note = Description of Artificial Sequence: Synthetic oligonucleotide
  misc_feature 1..20: note = Target: ANGPTL3; (+) strand; PAM type: NRG; PAM sequence: TAG
  source 1..20: mol_type = other DNA
tctacctaaaatacaaaaat

SEQ ID NO: 9812 - DNA, 20 bp, synthetic construct
  misc_feature 1..20: note = Description of Artificial Sequence: Synthetic oligonucleotide
  misc_feature 1..20: note = Target: ANGPTL3; (+) strand; PAM type: NRG; PAM sequence: CAG
  source 1..20: mol_type = other DNA
cctaaaatacaaaaattagc

SEQ ID NO: 9813 - DNA, 20 bp, synthetic construct
  misc_feature 1..20: note = Description of Artificial Sequence: Synthetic oligonucleotide
  misc_feature 1..20: note = Target: ANGPTL3; (+) strand; PAM type: NRG; PAM sequence: AGG
  source 1..20: mol_type = other DNA
ctaaaatacaaaaattagcc

SEQ ID NO: 9814 - DNA, 20 bp, synthetic construct
  misc_feature 1..20: note = Description of Artificial Sequence: Synthetic oligonucleotide
  misc_feature 1..20: note = Target: ANGPTL3; (+) strand; PAM type: NRG; PAM sequence: TGG
  source 1..20: mol_type = other DNA
atacaaaaattagccaggcg

SEQ ID NO: 9815 - DNA, 20 bp, synthetic construct
  misc_feature 1..20: note = Description of Artificial Sequence: Synthetic oligonucleotide
  misc_feature 1..20: note = Target: ANGPTL3; (+) strand; PAM type: NRG; PAM sequence: TGG
  source 1..20: mol_type = other DNA
caaaaattagccaggcgtgg

SEQ ID NO: 9816 - DNA, 20 bp, synthetic construct
  misc_feature 1..20: note = Description of Artificial Sequence: Synthetic oligonucleotide
  misc_feature 1..20: note = Target: ANGPTL3; (+) strand; PAM type: NRG; PAM sequence: CAG
  source 1..20: mol_type = other DNA
ggcgtggtggcatgtgccta

SEQ ID NO: 9817 - DNA, 20 bp, synthetic construct
  misc_feature 1..20: note = Description of Artificial Sequence: Synthetic oligonucleotide
  misc_feature 1..20: note = Target: ANGPTL3; (+) strand; PAM type: NRG; PAM sequence: CAG
  source 1..20: mol_type = other DNA
gtggcatgtgcctacagtcc

SEQ ID NO: 9818 - DNA, 20 bp, synthetic construct
  misc_feature 1..20: note = Description of Artificial Sequence: Synthetic oligonucleotide
  misc_feature 1..20: note = Target: ANGPTL3; (+) strand; PAM type: NRG; PAM sequence: AAG
  source 1..20: mol_type = other DNA
gcctacagtcccagctactc

SEQ ID NO: 9819 - DNA, 20 bp, synthetic construct
  misc_feature 1..20: note = Description of Artificial Sequence: Synthetic oligonucleotide
  misc_feature 1..20: note = Target: ANGPTL3; (+) strand; PAM type: NRG; PAM sequence: GAG
  source 1..20: mol_type = other DNA
ctacagtcccagctactcaa

SEQ ID NO: 9820 - DNA, 20 bp, synthetic construct
  misc_feature 1..20: note = Description of Artificial Sequence: Synthetic oligonucleotide
  misc_feature 1..20: note = Target: ANGPTL3; (+) strand; PAM type: NRG; PAM sequence: AGG
  source 1..20: mol_type = other DNA
tacagtcccagctactcaag

SEQ ID NO: 9821 - DNA, 20 bp, synthetic construct
  misc_feature 1..20: note = Description of Artificial Sequence: Synthetic oligonucleotide
  misc_feature 1..20: note = Target: ANGPTL3; (+) strand; PAM type: NRG; PAM sequence: GAG
  source 1..20: mol_type = other DNA
tcccagctactcaagaggct

SEQ ID NO: 9822 - DNA, 20 bp, synthetic construct
  misc_feature 1..20: note = Description of Artificial Sequence: Synthetic oligonucleotide
  misc_feature 1..20: note = Target: ANGPTL3; (+) strand; PAM type: NRG; PAM sequence: CAG
  source 1..20: mol_type = other DNA
agctactcaagaggctgaga

SEQ ID NO: 9823 - DNA, 20 bp, synthetic construct
  misc_feature 1..20: note = Description of Artificial Sequence: Synthetic oligonucleotide
  misc_feature 1..20: note = Target: ANGPTL3; (+) strand; PAM type: NRG; PAM sequence: AGG
  source 1..20: mol_type = other DNA
gctactcaagaggctgagac

SEQ ID NO: 9824 - DNA, 20 bp, synthetic construct
  misc_feature 1..20: note = Description of Artificial Sequence: Synthetic oligonucleotide
  misc_feature 1..20: note = Target: ANGPTL3; (+) strand; PAM type: NRG; PAM sequence: GAG
  source 1..20: mol_type = other DNA
tactcaagaggctgagacag

SEQ ID NO: 9825 - DNA, 20 bp, synthetic construct
  misc_feature 1..20: note = Description of Artificial Sequence: Synthetic oligonucleotide
  misc_feature 1..20: note = Target: ANGPTL3; (+) strand; PAM type: NRG; PAM sequence: CAG
  source 1..20: mol_type = other DNA
acaggagaatcgcttgaacc

SEQ ID NO: 9826 - DNA, 20 bp, synthetic construct
  misc_feature 1..20: note = Description of Artificial Sequence: Synthetic oligonucleotide
  misc_feature 1..20: note = Target: ANGPTL3; (+) strand; PAM type: NRG; PAM sequence: AGG
  source 1..20: mol_type = other DNA
caggagaatcgcttgaaccc

SEQ ID NO: 9827 - DNA, 20 bp, synthetic construct
  misc_feature 1..20: note = Description of Artificial Sequence: Synthetic oligonucleotide
  misc_feature 1..20: note = Target: ANGPTL3; (+) strand; PAM type: NRG; PAM sequence: GAG
  source 1..20: mol_type = other DNA
ggagaatcgcttgaacccag

SEQ ID NO: 9828 - DNA, 20 bp, synthetic construct
  misc_feature 1..20: note = Description of Artificial Sequence: Synthetic oligonucleotide
  misc_feature 1..20: note = Target: ANGPTL3; (+) strand; PAM type: NRG; PAM sequence: AGG
  source 1..20: mol_type = other DNA
gagaatcgcttgaacccagg

SEQ ID NO: 9829 - DNA, 20 bp, synthetic construct
  misc_feature 1..20: note = Description of Artificial Sequence: Synthetic oligonucleotide
  misc_feature 1..20: note = Target: ANGPTL3; (+) strand; PAM type: NRG; PAM sequence: CGG
  source 1..20: mol_type = other DNA
aatcgcttgaacccaggagg

SEQ ID NO: 9830 - DNA, 20 bp, synthetic construct
  misc_feature 1..20: note = Description of Artificial Sequence: Synthetic oligonucleotide
  misc_feature 1..20: note = Target: ANGPTL3; (+) strand; PAM type: NRG; PAM sequence: GAG
  source 1..20: mol_type = other DNA
tcgcttgaacccaggaggcg

SEQ ID NO: 9831 - DNA, 20 bp, synthetic construct
  misc_feature 1..20: note = Description of Artificial Sequence: Synthetic oligonucleotide
  misc_feature 1..20: note = Target: ANGPTL3; (+) strand; PAM type: NRG; PAM sequence: AGG
  source 1..20: mol_type = other DNA
cgcttgaacccaggaggcgg

SEQ ID NO: 9832 - DNA, 20 bp, synthetic construct
  misc_feature 1..20: note = Description of Artificial Sequence: Synthetic oligonucleotide
  misc_feature 1..20: note = Target: ANGPTL3; (+) strand; PAM type: NRG; PAM sequence: CAG
  source 1..20: mol_type = other DNA
aacccaggaggcggaggttg

SEQ ID NO: 9833 - DNA, 20 bp, synthetic construct
  misc_feature 1..20: note = Description of Artificial Sequence: Synthetic oligonucleotide
  misc_feature 1..20: note = Target: ANGPTL3; (+) strand; PAM type: NRG; PAM sequence: GAG
  source 1..20: mol_type = other DNA
caggaggcggaggttgcagt

SEQ ID NO: 9834 - DNA, 20 bp, synthetic construct
  misc_feature 1..20: note = Description of Artificial Sequence: Synthetic oligonucleotide
  misc_feature 1..20: note = Target: ANGPTL3; (+) strand; PAM type: NRG; PAM sequence: GAG
  source 1..20: mol_type = other DNA
ggcggaggttgcagtgagct

SEQ ID NO: 9835 - DNA, 20 bp, synthetic construct
  misc_feature 1..20: note = Description of Artificial Sequence: Synthetic oligonucleotide
  misc_feature 1..20: note = Target: ANGPTL3; (+) strand; PAM type: NRG; PAM sequence: TGG
  source 1..20: mol_type = other DNA
ctgagatcacaccaatgcac

SEQ ID NO: 9836 - DNA, 20 bp, synthetic construct
  misc_feature 1..20: note = Description of Artificial Sequence: Synthetic oligonucleotide
  misc_feature 1..20: note = Target: ANGPTL3; (+) strand; PAM type: NRG; PAM sequence: GGG
  source 1..20: mol_type = other DNA
tgagatcacaccaatgcact

SEQ ID NO: 9837 - DNA, 20 bp, synthetic construct
  misc_feature 1..20: note = Description of Artificial Sequence: Synthetic oligonucleotide
  misc_feature 1..20: note = Target: ANGPTL3; (+) strand; PAM type: NRG; PAM sequence: CAG
  source 1..20: mol_type = other DNA
cacaccaatgcactgggtga

SEQ ID NO: 9838 - DNA, 20 bp, synthetic construct
  misc_feature 1..20: note = Description of Artificial Sequence: Synthetic oligonucleotide
  misc_feature 1..20: note = Target: ANGPTL3; (+) strand; PAM type: NRG; PAM sequence: AAG
  source 1..20: mol_type = other DNA
aatgcactgggtgacagaac

SEQ ID NO: 9839 - DNA, 20 bp, synthetic construct
  misc_feature 1..20: note = Description of Artificial Sequence: Synthetic oligonucleotide
  misc_feature 1..20: note = Target: ANGPTL3; (+) strand; PAM type: NRG; PAM sequence: CAG
  source 1..20: mol_type = other DNA
aaaataaataacaaattccc

SEQ ID NO: 9840 - DNA, 20 bp, synthetic construct
  misc_feature 1..20: note = Description of Artificial Sequence: Synthetic oligonucleotide
  misc_feature 1..20: note = Target: ANGPTL3; (+) strand; PAM type: NRG; PAM sequence: CAG
  source 1..20: mol_type = other DNA
tttatatccattaatatgac

SEQ ID NO: 9841 - DNA, 20 bp, synthetic construct
  misc_feature 1..20: note = Description of Artificial Sequence: Synthetic oligonucleotide
  misc_feature 1..20: note = Target: ANGPTL3; (+) strand; PAM type: NRG; PAM sequence: CAG
  source 1..20: mol_type = other DNA
taatatgaccagcatgttcc

SEQ ID NO: 9842 - DNA, 20 bp, synthetic construct
  misc_feature 1..20: note = Description of Artificial Sequence: Synthetic oligonucleotide
  misc_feature 1..20: note = Target: ANGPTL3; (+) strand; PAM type: NRG; PAM sequence: CAG
  source 1..20: mol_type = other DNA
gaccagcatgttcccagtca

SEQ ID NO: 9843 - DNA, 20 bp, synthetic construct
  misc_feature 1..20: note = Description of Artificial Sequence: Synthetic oligonucleotide
  misc_feature 1..20: note = Target: ANGPTL3; (+) strand; PAM type: NRG; PAM sequence: AAG
  source 1..20: mol_type = other DNA
cagcatgttcccagtcacag

SEQ ID NO: 9844 - DNA, 20 bp, synthetic construct
  misc_feature 1..20: note = Description of Artificial Sequence: Synthetic oligonucleotide
  misc_feature 1..20: note = Target: ANGPTL3; (+) strand; PAM type: NRG; PAM sequence: TGG
  source 1..20: mol_type = other DNA
tgttcccagtcacagaagcc

SEQ ID NO: 9845 - DNA, 20 bp, synthetic construct
  misc_feature 1..20: note = Description of Artificial Sequence: Synthetic oligonucleotide
  misc_feature 1..20: note = Target: ANGPTL3; (+) strand; PAM type: NRG; PAM sequence: CGG
  source 1..20: mol_type = other DNA
agtcacagaagcctggaacc

SEQ ID NO: 9846 - DNA, 20 bp, synthetic construct
  misc_feature 1..20: note = Description of Artificial Sequence: Synthetic oligonucleotide
  misc_feature 1..20: note = Target: ANGPTL3; (+) strand; PAM type: NRG; PAM sequence: AAG
  source 1..20: mol_type = other DNA
cacagaagcctggaacccgg

SEQ ID NO: 9847 - DNA, 20 bp, synthetic construct
  misc_feature 1..20: note = Description of Artificial Sequence: Synthetic oligonucleotide
  misc_feature 1..20: note = Target: ANGPTL3; (+) strand; PAM type: NRG; PAM sequence: TGG
  source 1..20: mol_type = other DNA
tggaacccggaagacatctc

SEQ ID NO: 9848 - DNA, 20 bp, synthetic construct
  misc_feature 1..20: note = Description of Artificial Sequence: Synthetic oligonucleotide
  misc_feature 1..20: note = Target: ANGPTL3; (+) strand; PAM type: NRG; PAM sequence: AAG
  source 1..20: mol_type = other DNA
aactacctcttttgtatcat

SEQ ID NO: 9849 - DNA, 20 bp, synthetic construct
  misc_feature 1..20: note = Description of Artificial Sequence: Synthetic oligonucleotide
  misc_feature 1..20: note = Target: ANGPTL3; (+) strand; PAM type: NRG; PAM sequence: AAG
  source 1..20: mol_type = other DNA
cttttgtatcataagccacc

SEQ ID NO: 9850 - DNA, 20 bp, synthetic construct
  misc_feature 1..20: note = Description of Artificial Sequence: Synthetic oligonucleotide
  misc_feature 1..20: note = Target: ANGPTL3; (+) strand; PAM type: NRG; PAM sequence: AAG
  source 1..20: mol_type = other DNA
gaaacgtctcttaatcttat

SEQ ID NO: 9851 - DNA, 20 bp, synthetic construct
  misc_feature 1..20: note = Description of Artificial Sequence: Synthetic oligonucleotide
  misc_feature 1..20: note = Target: ANGPTL3; (+) strand; PAM type: NRG; PAM sequence: AAG
  source 1..20: mol_type = other DNA
cttataagctttcttcccca

SEQ ID NO: 9852 - DNA, 20 bp, synthetic construct
  misc_feature 1..20: note = Description of Artificial Sequence: Synthetic oligonucleotide
  misc_feature 1..20: note = Target: ANGPTL3; (+) strand; PAM type: NRG; PAM sequence: CAG
  source 1..20: mol_type = other DNA
ccaaagactgtctttaactt

SEQ ID NO: 9853 - DNA, 20 bp, synthetic construct
  misc_feature 1..20: note = Description of Artificial Sequence: Synthetic oligonucleotide
  misc_feature 1..20: note = Target: ANGPTL3; (+) strand; PAM type: NRG; PAM sequence: TAG
  source 1..20: mol_type = other DNA
actgtctttaacttcagtgc

SEQ ID NO: 9854 - DNA, 20 bp, synthetic construct
  misc_feature 1..20: note = Description of Artificial Sequence: Synthetic oligonucleotide
  misc_feature 1..20: note = Target: ANGPTL3; (+) strand; PAM type: NRG; PAM sequence: AAG
  source 1..20: mol_type = other DNA
acttcagtgctagattatat

SEQ ID NO: 9855 - DNA, 20 bp, synthetic construct
  misc_feature 1..20: note = Description of Artificial Sequence: Synthetic oligonucleotide
  misc_feature 1..20: note = Target: ANGPTL3; (+) strand; PAM type: NRG; PAM sequence: TAG
  source 1..20: mol_type = other DNA
tcagtgctagattatataag

SEQ ID NO: 9856 - DNA, 20 bp, synthetic construct
  misc_feature 1..20: note = Description of Artificial Sequence: Synthetic oligonucleotide
  misc_feature 1..20: note = Target: ANGPTL3; (+) strand; PAM type: NRG; PAM sequence: AAG
  source 1..20: mol_type = other DNA
ctccctgtcaatcttccgaa

SEQ ID NO: 9857 - DNA, 20 bp, synthetic construct
  misc_feature 1..20: note = Description of Artificial Sequence: Synthetic oligonucleotide
  misc_feature 1..20: note = Target: ANGPTL3; (+) strand; PAM type: NRG; PAM sequence: AGG
  source 1..20: mol_type = other DNA
tccctgtcaatcttccgaaa

SEQ ID NO: 9858 - DNA, 20 bp, synthetic construct
  misc_feature 1..20: note = Description of Artificial Sequence: Synthetic oligonucleotide
  misc_feature 1..20: note = Target: ANGPTL3; (+) strand; PAM type: NRG; PAM sequence: TGG
  source 1..20: mol_type = other DNA
ttccgaaaaggaatttgtaa

SEQ ID NO: 9859 - DNA, 20 bp, synthetic construct
  misc_feature 1..20: note = Description of Artificial Sequence: Synthetic oligonucleotide
  misc_feature 1..20: note = Target: ANGPTL3; (+) strand; PAM type: NRG; PAM sequence: TGG
  source 1..20: mol_type = other DNA
tgtaatggctgcatactgcc

SEQ ID NO: 9860 - DNA, 20 bp, synthetic construct
  misc_feature 1..20: note = Description of Artificial Sequence: Synthetic oligonucleotide
  misc_feature 1..20: note = Target: ANGPTL3; (+) strand; PAM type: NRG; PAM sequence: AAG
  source 1..20: mol_type = other DNA
tgcctggacctgtgtctttc

SEQ ID NO: 9861 - DNA, 20 bp, synthetic construct
  misc_feature 1..20: note = Description of Artificial Sequence: Synthetic oligonucleotide
  misc_feature 1..20: note = Target: ANGPTL3; (+) strand; PAM type: NRG; PAM sequence: AAG
  source 1..20: mol_type = other DNA
tctttcaagctcatctactg

SEQ ID NO: 9862 - DNA, 20 bp, synthetic construct
  misc_feature 1..20: note = Description of Artificial Sequence: Synthetic oligonucleotide
  misc_feature 1..20: note = Target: ANGPTL3; (+) strand; PAM type: NRG; PAM sequence: AAG
  source 1..20: mol_type = other DNA
ttcaagctcatctactgaag

SEQ ID NO: 9863 - DNA, 20 bp, synthetic construct
  misc_feature 1..20: note = Description of Artificial Sequence: Synthetic oligonucleotide
  misc_feature 1..20: note = Target: ANGPTL3; (+) strand; PAM type: NRG; PAM sequence: CAG
  source 1..20: mol_type = other DNA
catctactgaagaagtgtaa

SEQ ID NO: 9864 - DNA, 20 bp, synthetic construct
  misc_feature 1..20: note = Description of Artificial Sequence: Synthetic oligonucleotide
  misc_feature 1..20: note = Target: ANGPTL3; (+) strand; PAM type: NRG; PAM sequence: CAG
  source 1..20: mol_type = other DNA
ctactgaagaagtgtaacag

SEQ ID NO: 9865 - DNA, 20 bp, synthetic construct
  misc_feature 1..20: note = Description of Artificial Sequence: Synthetic oligonucleotide
  misc_feature 1..20: note = Target: ANGPTL3; (+) strand; PAM type: NRG; PAM sequence: GAG
  source 1..20: mol_type = other DNA
actgaagaagtgtaacagca

SEQ ID NO: 9866 - DNA, 20 bp, synthetic construct
  misc_feature 1..20: note = Description of Artificial Sequence: Synthetic oligonucleotide
  misc_feature 1..20: note = Target: ANGPTL3; (+) strand; PAM type: NRG; PAM sequence: AGG
  source 1..20: mol_type = other DNA
ctgaagaagtgtaacagcag

SEQ ID NO: 9867 - DNA, 20 bp, synthetic construct
  misc_feature 1..20: note = Description of Artificial Sequence: Synthetic oligonucleotide
  misc_feature 1..20: note = Target: ANGPTL3; (+) strand; PAM type: NRG; PAM sequence: TGG
  source 1..20: mol_type = other DNA
aaacaaatccttttattgtc

SEQ ID NO: 9868 - DNA, 20 bp, synthetic construct
  misc_feature 1..20: note = Description of Artificial Sequence: Synthetic oligonucleotide
  misc_feature 1..20: note = Target: ANGPTL3; (+) strand; PAM type: NRG; PAM sequence: GAG
  source 1..20: mol_type = other DNA
acaaatccttttattgtctg

SEQ ID NO: 9869 - DNA, 20 bp, synthetic construct
  misc_feature 1..20: note = Description of Artificial Sequence: Synthetic oligonucleotide
  misc_feature 1..20: note = Target: ANGPTL3; (+) strand; PAM type: NRG; PAM sequence: CAG
  source 1..20: mol_type = other DNA
ccttttattgtctggagtta

SEQ ID NO: 9870 - DNA, 20 bp, synthetic construct
  misc_feature 1..20: note = Description of Artificial Sequence: Synthetic oligonucleotide
  misc_feature 1..20: note = Target: ANGPTL3; (+) strand; PAM type: NRG; PAM sequence: AGG
  source 1..20: mol_type = other DNA
cttttattgtctggagttac

SEQ ID NO: 9871 - DNA, 20 bp, synthetic construct
  misc_feature 1..20: note = Description of Artificial Sequence: Synthetic oligonucleotide
  misc_feature 1..20: note = Target: ANGPTL3; (+) strand; PAM type: NRG; PAM sequence: CAG
  source 1..20: mol_type = other DNA
ctatatgcacaaatttcttt

SEQ ID NO: 9872 - DNA, 20 bp, synthetic construct
  misc_feature 1..20: note = Description of Artificial Sequence: Synthetic oligonucleotide
  misc_feature 1..20: note = Target: ANGPTL3; (+) strand; PAM type: NRG; PAM sequence: TGG
  source 1..20: mol_type = other DNA
aatttctttcagaatcttat

SEQ ID NO: 9873 - DNA, 20 bp, synthetic construct
  misc_feature 1..20: note = Description of Artificial Sequence: Synthetic oligonucleotide
  misc_feature 1..20: note = Target: ANGPTL3; (+) strand; PAM type: NRG; PAM sequence: GGG
  source 1..20: mol_type = other DNA
atttctttcagaatcttatt

SEQ ID NO: 9874 - DNA, 20 bp, synthetic construct
  misc_feature 1..20: note = Description of Artificial Sequence: Synthetic oligonucleotide
  misc_feature 1..20: note = Target: ANGPTL3; (+) strand; PAM type: NRG; PAM sequence: TAG
  source 1..20: mol_type = other DNA
tcagaatcttattgggatct

SEQ ID NO: 9875 - DNA, 20 bp, synthetic construct
  misc_feature 1..20: note = Description of Artificial Sequence: Synthetic oligonucleotide
  misc_feature 1..20: note = Target: ANGPTL3; (+) strand; PAM type: NRG; PAM sequence: TAG
  source 1..20: mol_type = other DNA
tgggatcttagcttaaatct

SEQ ID NO: 9876 - DNA, 20 bp, synthetic construct
  misc_feature 1..20: note = Description of Artificial Sequence: Synthetic oligonucleotide
  misc_feature 1..20: note = Target: ANGPTL3; (+) strand; PAM type: NRG; PAM sequence: CAG
  source 1..20: mol_type = other DNA
taaatctatcttcatgcctg

SEQ ID NO: 9877 - DNA, 20 bp, synthetic construct
  misc_feature 1..20: note = Description of Artificial Sequence: Synthetic oligonucleotide
  misc_feature 1..20: note = Target: ANGPTL3; (+) strand; PAM type: NRG; PAM sequence: TGG
  source 1..20: mol_type = other DNA
atctatcttcatgcctgcag

SEQ ID NO: 9878 - DNA, 20 bp, synthetic construct
  misc_feature 1..20: note = Description of Artificial Sequence: Synthetic oligonucleotide
  misc_feature 1..20: note = Target: ANGPTL3; (+) strand; PAM type: NRG; PAM sequence: AAG
  source 1..20: mol_type = other DNA
gtggctcacacctgtaatcc

SEQ ID NO: 9879 - DNA, 20 bp, synthetic construct
  misc_feature 1..20: note = Description of Artificial Sequence: Synthetic oligonucleotide
  misc_feature 1..20: note = Target: ANGPTL3; (+) strand; PAM type: NRG; PAM sequence: TGG
  source 1..20: mol_type = other DNA
cacctgtaatccaagtattt

SEQ ID NO: 9880 - DNA, 20 bp, synthetic construct
  misc_feature 1..20: note = Description of Artificial Sequence: Synthetic oligonucleotide
  misc_feature 1..20: note = Target: ANGPTL3; (+) strand; PAM type: NRG; PAM sequence: GGG
  source 1..20: mol_type = other DNA
acctgtaatccaagtatttt

SEQ ID NO: 9881 - DNA, 20 bp, synthetic construct
  misc_feature 1..20: note = Description of Artificial Sequence: Synthetic oligonucleotide
  misc_feature 1..20: note = Target: ANGPTL3; (+) strand; PAM type: NRG; PAM sequence: GAG
  source 1..20: mol_type = other DNA
ctgtaatccaagtattttgg

SEQ ID NO: 9882 - DNA, 20 bp, synthetic construct
  misc_feature 1..20: note = Description of Artificial Sequence: Synthetic oligonucleotide
  misc_feature 1..20: note = Target: ANGPTL3; (+) strand; PAM type: NRG; PAM sequence: AGG
  source 1..20: mol_type = other DNA
tgtaatccaagtattttggg

SEQ ID NO: 9883 - DNA, 20 bp, synthetic construct
  misc_feature 1..20: note = Description of Artificial Sequence: Synthetic oligonucleotide
  misc_feature 1..20: note = Target: ANGPTL3; (+) strand; PAM type: NRG; PAM sequence: CGG
  source 1..20: mol_type = other DNA
atccaagtattttgggaggc

SEQ ID NO: 9884 - DNA, 20 bp, synthetic construct
  misc_feature 1..20: note = Description of Artificial Sequence: Synthetic oligonucleotide
  misc_feature 1..20: note = Target: ANGPTL3; (+) strand; PAM type: NRG; PAM sequence: GGG
  source 1..20: mol_type = other DNA
tccaagtattttgggaggcc

SEQ ID NO: 9885 - DNA, 20 bp, synthetic construct
  misc_feature 1..20: note = Description of Artificial Sequence: Synthetic oligonucleotide
  misc_feature 1..20: note = Target: ANGPTL3; (+) strand; PAM type: NRG; PAM sequence: GGG
  source 1..20: mol_type = other DNA
ccaagtattttgggaggccg

SEQ ID NO: 9886 - DNA, 20 bp, synthetic construct
  misc_feature 1..20: note = Description of Artificial Sequence: Synthetic oligonucleotide
  misc_feature 1..20: note = Target: ANGPTL3; (+) strand; PAM type: NRG; PAM sequence: CGG
  source 1..20: mol_type = other DNA
agtattttgggaggccgggg

SEQ ID NO: 9887 - DNA, 20 bp, synthetic construct
  misc_feature 1..20: note = Description of Artificial Sequence: Synthetic oligonucleotide
  misc_feature 1..20: note = Target: ANGPTL3; (+) strand; PAM type: NRG; PAM sequence: GGG
  source 1..20: mol_type = other DNA
gtattttgggaggccggggc

SEQ ID NO: 9888 - DNA, 20 bp, synthetic construct
  misc_feature 1..20: note = Description of Artificial Sequence: Synthetic oligonucleotide
  misc_feature 1..20: note = Target: ANGPTL3; (+) strand; PAM type: NRG; PAM sequence: GAG
  source 1..20: mol_type = other DNA
attttgggaggccggggcgg

SEQ ID NO: 9889 - DNA, 20 bp, synthetic construct
  misc_feature 1..20: note = Description of Artificial Sequence: Synthetic oligonucleotide
  misc_feature 1..20: note = Target: ANGPTL3; (+) strand; PAM type: NRG; PAM sequence: CAG
  source 1..20: mol_type = other DNA
gcgggagtactgcttgaacc

SEQ ID NO: 9890 - DNA, 20 bp, synthetic construct
  misc_feature 1..20: note = Description of Artificial Sequence: Synthetic oligonucleotide
  misc_feature 1..20: note = Target: ANGPTL3; (+) strand; PAM type: NRG; PAM sequence: AGG
  source 1..20: mol_type = other DNA
cgggagtactgcttgaaccc

SEQ ID NO: 9891 - DNA, 20 bp, synthetic construct
  misc_feature 1..20: note = Description of Artificial Sequence: Synthetic oligonucleotide
  misc_feature 1..20: note = Target: ANGPTL3; (+) strand; PAM type: NRG; PAM sequence: GAG
  source 1..20: mol_type = other DNA
ggagtactgcttgaacccag

SEQ ID NO: 9892 - DNA, 20 bp, synthetic construct
  misc_feature 1..20: note = Description of Artificial Sequence: Synthetic oligonucleotide
  misc_feature 1..20: note = Target: ANGPTL3; (+) strand; PAM type: NRG; PAM sequence: AAG
  source 1..20: mol_type = other DNA
ctgcttgaacccaggagtcc

SEQ ID NO: 9893 - DNA, 20 bp, synthetic construct
  misc_feature 1..20: note = Description of Artificial Sequence: Synthetic oligonucleotide
  misc_feature 1..20: note = Target: ANGPTL3; (+) strand; PAM type: NRG; PAM sequence: CAG
  source 1..20: mol_type = other DNA
tgaacccaggagtccaagat

SEQ ID NO: 9894 - DNA, 20 bp, synthetic construct
  misc_feature 1..20: note = Description of Artificial Sequence: Synthetic oligonucleotide
  misc_feature 1..20: note = Target: ANGPTL3; (+) strand; PAM type: NRG; PAM sequence: CGG
  source 1..20: mol_type = other DNA
caagatcagcctgtgcaaca

SEQ ID NO: 9895 - DNA, 20 bp, synthetic construct
  misc_feature 1..20: note = Description of Artificial Sequence: Synthetic oligonucleotide
  misc_feature 1..20: note = Target: ANGPTL3; (+) strand; PAM type: NRG; PAM sequence: TAG
  source 1..20: mol_type = other DNA
tctacaaaaaatacaaaaat

SEQ ID NO: 9896 - DNA, 20 bp, synthetic construct
  misc_feature 1..20: note = Description of Artificial Sequence: Synthetic oligonucleotide
  misc_feature 1..20: note = Target: ANGPTL3; (+) strand; PAM type: NRG; PAM sequence: TGG
  source 1..20: mol_type = other DNA
caaaaaatacaaaaattagc

SEQ ID NO: 9897 - DNA, 20 bp, synthetic construct
  misc_feature 1..20: note = Description of Artificial Sequence: Synthetic oligonucleotide
  misc_feature 1..20: note = Target: ANGPTL3; (+) strand; PAM type: NRG; PAM sequence: GGG
  source 1..20: mol_type = other DNA
aaaaaatacaaaaattagct

SEQ ID NO: 9898 - DNA, 20 bp, synthetic construct
  misc_feature 1..20: note = Description of Artificial Sequence: Synthetic oligonucleotide
  misc_feature 1..20: note = Target: ANGPTL3; (+) strand; PAM type: NRG; PAM sequence: TGG
  source 1..20: mol_type = other DNA
atacaaaaattagctgggtg

SEQ ID NO: 9899 - DNA, 20 bp, synthetic construct
  misc_feature 1..20: note = Description of Artificial Sequence: Synthetic oligonucleotide
  misc_feature 1..20: note = Target: ANGPTL3; (+) strand; PAM type: NRG; PAM sequence: TGG
  source 1..20: mol_type = other DNA
caaaaattagctgggtgtgg

SEQ ID NO: 9900 - DNA, 20 bp, synthetic construct
  misc_feature 1..20: note = Description of Artificial Sequence: Synthetic oligonucleotide
  misc_feature 1..20: note = Target: ANGPTL3; (+) strand; PAM type: NRG; PAM sequence: CAG
  source 1..20: mol_type = other DNA
aaattagctgggtgtggtgg

SEQ ID NO: 9901 - DNA, 20 bp, synthetic construct
  misc_feature 1..20: note = Description of Artificial Sequence: Synthetic oligonucleotide
  misc_feature 1..20: note = Target: ANGPTL3; (+) strand; PAM type: NRG; PAM sequence: AGG
  source 1..20: mol_type = other DNA
aattagctgggtgtggtggc

SEQ ID NO: 9902 - DNA, 20 bp, synthetic construct
  misc_feature 1..20: note = Description of Artificial Sequence: Synthetic oligonucleotide
  misc_feature 1..20: note = Target: ANGPTL3; (+) strand; PAM type: NRG; PAM sequence: TGG
  source 1..20: mol_type = other DNA
tgcctgtaatcccaactact

SEQ ID NO: 9903 - DNA, 20 bp, synthetic construct
  misc_feature 1..20: note = Description of Artificial Sequence: Synthetic oligonucleotide
  misc_feature 1..20: note = Target: ANGPTL3; (+) strand; PAM type: NRG; PAM sequence: GGG
  source 1..20: mol_type = other DNA
gcctgtaatcccaactactt

SEQ ID NO: 9904 - DNA, 20 bp, synthetic construct
  misc_feature 1..20: note = Description of Artificial Sequence: Synthetic oligonucleotide
  misc_feature 1..20: note = Target: ANGPTL3; (+) strand; PAM type: NRG; PAM sequence: GAG
  source 1..20: mol_type = other DNA
ctgtaatcccaactacttgg

SEQ ID NO: 9905 - DNA, 20 bp, synthetic construct
  misc_feature 1..20: note = Description of Artificial Sequence: Synthetic oligonucleotide
  misc_feature 1..20: note = Target: ANGPTL3; (+) strand; PAM type: NRG; PAM sequence: AGG
  source 1..20: mol_type = other DNA
tgtaatcccaactacttggg

SEQ ID NO: 9906 - DNA, 20 bp, synthetic construct
  misc_feature 1..20: note = Description of Artificial Sequence: Synthetic oligonucleotide
  misc_feature 1..20: note = Target: ANGPTL3; (+) strand; PAM type: NRG; PAM sequence: GAG
  source 1..20: mol_type = other DNA
tcccaactacttgggaggct

SEQ ID NO: 9907 - DNA, 20 bp, synthetic construct
  misc_feature 1..20: note = Description of Artificial Sequence: Synthetic oligonucleotide
  misc_feature 1..20: note = Target: ANGPTL3; (+) strand; PAM type: NRG; PAM sequence: AGG
  source 1..20: mol_type = other DNA
cccaactacttgggaggctg

SEQ ID NO: 9908 - DNA, 20 bp, synthetic construct
  misc_feature 1..20: note = Description of Artificial Sequence: Synthetic oligonucleotide
  misc_feature 1..20: note = Target: ANGPTL3; (+) strand; PAM type: NRG; PAM sequence: CAG
  source 1..20: mol_type = other DNA
aactacttgggaggctgagg

SEQ ID NO: 9909 - DNA, 20 bp, synthetic construct
  misc_feature 1..20: note = Description of Artificial Sequence: Synthetic oligonucleotide
  misc_feature 1..20: note = Target: ANGPTL3; (+) strand; PAM type: NRG; PAM sequence: AGG
  source 1..20: mol_type = other DNA
actacttgggaggctgaggc

SEQ ID NO: 9910 - DNA, 20 bp, synthetic construct
  misc_feature 1..20: note = Description of Artificial Sequence: Synthetic oligonucleotide
  misc_feature 1..20: note = Target: ANGPTL3; (+) strand; PAM type: NRG; PAM sequence: GAG
  source 1..20: mol_type = other DNA
tacttgggaggctgaggcag

SEQ ID NO: 9911 - DNA, 20 bp, synthetic construct
  misc_feature 1..20: note = Description of Artificial Sequence: Synthetic oligonucleotide
  misc_feature 1..20: note = Target: ANGPTL3; (+) strand; PAM type: NRG; PAM sequence: TGG
  source 1..20: mol_type = other DNA
ggctgaggcaggagaatcgc

SEQ ID NO: 9912 - DNA, 20 bp, synthetic construct
  misc_feature 1..20: note = Description of Artificial Sequence: Synthetic oligonucleotide
  misc_feature 1..20: note = Target: ANGPTL3; (+) strand; PAM type: NRG; PAM sequence: GAG
  source 1..20: mol_type = other DNA
ctgaggcaggagaatcgctg

SEQ ID NO: 9913 - DNA, 20 bp, synthetic construct
  misc_feature 1..20: note = Description of Artificial Sequence: Synthetic oligonucleotide
  misc_feature 1..20: note = Target: ANGPTL3; (+) strand; PAM type: NRG; PAM sequence: TGG
  source 1..20: mol_type = other DNA
gcaggagaatcgctggagcc

SEQ ID NO: 9914 - DNA, 20 bp, synthetic construct
  misc_feature 1..20: note = Description of Artificial Sequence: Synthetic oligonucleotide
  misc_feature 1..20: note = Target: ANGPTL3; (+) strand; PAM type: NRG; PAM sequence: GGG
  source 1..20: mol_type = other DNA
caggagaatcgctggagcct

SEQ ID NO: 9915 - DNA, 20 bp, synthetic construct
  misc_feature 1..20: note = Description of Artificial Sequence: Synthetic oligonucleotide
  misc_feature 1..20: note = Target: ANGPTL3; (+) strand; PAM type: NRG; PAM sequence: AAG
  source 1..20: mol_type = other DNA
gagaatcgctggagcctggg

SEQ ID NO: 9916 - DNA, 20 bp, synthetic construct
  misc_feature 1..20: note = Description of Artificial Sequence: Synthetic oligonucleotide
  misc_feature 1..20: note = Target: ANGPTL3; (+) strand; PAM type: NRG; PAM sequence: AAG
  source 1..20: mol_type = other DNA
tcgctggagcctgggaagtc

SEQ ID NO: 9917 - DNA, 20 bp, synthetic construct
  misc_feature 1..20: note = Description of Artificial Sequence: Synthetic oligonucleotide
  misc_feature 1..20: note = Target: ANGPTL3; (+) strand; PAM type: NRG; PAM sequence: CAG
  source 1..20: mol_type = other DNA
agcctgggaagtcaagcctg

SEQ ID NO: 9918 - DNA, 20 bp, synthetic construct
  misc_feature 1..20: note = Description of Artificial Sequence: Synthetic oligonucleotide
  misc_feature 1..20: note = Target: ANGPTL3; (+) strand; PAM type: NRG; PAM sequence: TAG
  source 1..20: mol_type = other DNA
atgatcctaacactgcattc

SEQ ID NO: 9919 - DNA, 20 bp, synthetic construct
  misc_feature 1..20: note = Description of Artificial Sequence: Synthetic oligonucleotide
  misc_feature 1..20: note = Target: ANGPTL3; (+) strand; PAM type: NRG; PAM sequence: TGG
  source 1..20: mol_type = other DNA
cctaacactgcattctagcc

SEQ ID NO: 9920 - DNA, 20 bp, synthetic construct
  misc_feature 1..20: note = Description of Artificial Sequence: Synthetic oligonucleotide
  misc_feature 1..20: note = Target: ANGPTL3; (+) strand; PAM type: NRG; PAM sequence: GGG
  source 1..20: mol_type = other DNA
ctaacactgcattctagcct

SEQ ID NO: 9921 - DNA, 20 bp, synthetic construct
  misc_feature 1..20: note = Description of Artificial Sequence: Synthetic oligonucleotide
  misc_feature 1..20: note = Target: ANGPTL3; (+) strand; PAM type: NRG; PAM sequence: CAG
  source 1..20: mol_type = other DNA
ctgcattctagcctgggcaa

SEQ ID NO: 9922 - DNA, 20 bp, synthetic construct
  misc_feature 1..20: note = Description of Artificial Sequence: Synthetic oligonucleotide
  misc_feature 1..20: note = Target: ANGPTL3; (+) strand; PAM type: NRG; PAM sequence: GAG
  source 1..20: mol_type = other DNA
gcattctagcctgggcaaca

SEQ ID NO: 9923 - DNA, 20 bp, synthetic construct
  misc_feature 1..20: note = Description of Artificial Sequence: Synthetic oligonucleotide
  misc_feature 1..20: note = Target: ANGPTL3; (+) strand; PAM type: NRG; PAM sequence: GAG
  source 1..20: mol_type = other DNA
tctagcctgggcaacagagt

SEQ ID NO: 9924 - DNA, 20 bp, synthetic construct
  misc_feature 1..20: note = Description of Artificial Sequence: Synthetic oligonucleotide
  misc_feature 1..20: note = Target: ANGPTL3; (+) strand; PAM type: NRG; PAM sequence: AAG
  source 1..20: mol_type = other DNA
aaaaatatttatttcccccc

SEQ ID NO: 9925 - DNA, 20 bp, synthetic construct
  misc_feature 1..20: note = Description of Artificial Sequence: Synthetic oligonucleotide
  misc_feature 1..20: note = Target: ANGPTL3; (+) strand; PAM type: NRG; PAM sequence: AAG
  source 1..20: mol_type = other DNA
tttccccccaagtatttaaa

SEQ ID NO: 9926 - DNA, 20 bp, synthetic construct
  misc_feature 1..20: note = Description of Artificial Sequence: Synthetic oligonucleotide
  misc_feature 1..20: note = Target: ANGPTL3; (+) strand; PAM type: NRG; PAM sequence: TAG
  source 1..20: mol_type = other DNA
tatttaaaaagtgatgttcc

SEQ ID NO: 9927 - DNA, 20 bp, synthetic construct
  misc_feature 1..20: note = Description of Artificial Sequence: Synthetic oligonucleotide
  misc_feature 1..20: note = Target: ANGPTL3; (+) strand; PAM type: NRG; PAM sequence: AAG
  source 1..20: mol_type = other DNA
ttaaaaagtgatgttcctag

SEQ ID NO: 9928 - DNA, 20 bp, synthetic construct
  misc_feature 1..20: note = Description of Artificial Sequence: Synthetic oligonucleotide
  misc_feature 1..20: note = Target: ANGPTL3; (+) strand; PAM type: NRG; PAM sequence: TAG
  source 1..20: mol_type = other DNA
gtgaacttgcacgtcccata

SEQ ID NO: 9929 - DNA, 20 bp, synthetic construct
  misc_feature 1..20: note = Description of Artificial Sequence: Synthetic oligonucleotide
  misc_feature 1..20: note = Target: ANGPTL3; (+) strand; PAM type: NRG; PAM sequence: AAG
  source 1..20: mol_type = other DNA
ccatatagttgtgccctcac

SEQ ID NO: 9930 - DNA, 20 bp, synthetic construct
  misc_feature 1..20: note = Description of Artificial Sequence: Synthetic oligonucleotide
  misc_feature 1..20: note = Target: ANGPTL3; (+) strand; PAM type: NRG; PAM sequence: TAG
  source 1..20: mol_type = other DNA
acaagaatgtatactccaat

SEQ ID NO: 9931 - DNA, 20 bp, synthetic construct
  misc_feature 1..20: note = Description of Artificial Sequence: Synthetic oligonucleotide
  misc_feature 1..20: note = Target: ANGPTL3; (+) strand; PAM type: NRG; PAM sequence: AAG
  source 1..20: mol_type = other DNA
agaatgtatactccaattag

SEQ ID NO: 9932 - DNA, 20 bp, synthetic construct
  misc_feature 1..20: note = Description of Artificial Sequence: Synthetic oligonucleotide
  misc_feature 1..20: note = Target: ANGPTL3; (+) strand; PAM type: NRG; PAM sequence: GAG
  source 1..20: mol_type = other DNA
aatgtatactccaattagaa

SEQ ID NO: 9933 - DNA, 20 bp, synthetic construct
  misc_feature 1..20: note = Description of Artificial Sequence: Synthetic oligonucleotide
  misc_feature 1..20: note = Target: ANGPTL3; (+) strand; PAM type: NRG; PAM sequence: TAG
  source 1..20: mol_type = other DNA
atactccaattagaagagta

SEQ ID NO: 9934 - DNA, 20 bp, synthetic construct
  misc_feature 1..20: note = Description of Artificial Sequence: Synthetic oligonucleotide
  misc_feature 1..20: note = Target: ANGPTL3; (+) strand; PAM type: NRG; PAM sequence: AGG
  source 1..20: mol_type = other DNA
tactccaattagaagagtat

SEQ ID NO: 9935 - DNA, 20 bp, synthetic construct
  misc_feature 1..20: note = Description of Artificial Sequence: Synthetic oligonucleotide
  misc_feature 1..20: note = Target: ANGPTL3; (+) strand; PAM type: NRG; PAM sequence: TGG
  source 1..20: mol_type = other DNA
attagaagagtataggcctt

SEQ ID NO: 9936 - DNA, 20 bp, synthetic construct
  misc_feature 1..20: note = Description of Artificial Sequence: Synthetic oligonucleotide
  misc_feature 1..20: note = Target: ANGPTL3; (+) strand; PAM type: NRG; PAM sequence: CAG
  source 1..20: mol_type = other DNA
aacaaaatccaaaatccttc

SEQ ID NO: 9937 - DNA, 20 bp, synthetic construct
  misc_feature 1..20: note = Description of Artificial Sequence: Synthetic oligonucleotide
  misc_feature 1..20: note = Target: ANGPTL3; (+) strand; PAM type: NRG; PAM sequence: AGG
  source 1..20: mol_type = other DNA
acaaaatccaaaatccttcc

SEQ ID NO: 9938 - DNA, 20 bp, synthetic construct
  misc_feature 1..20: note = Description of Artificial Sequence: Synthetic oligonucleotide
  misc_feature 1..20: note = Target: ANGPTL3; (+) strand; PAM type: NRG; PAM sequence: AAG
  source 1..20: mol_type = other DNA
aaatccttccaggttttcaa

SEQ ID NO: 9939 - DNA, 20 bp, synthetic construct
  misc_feature 1..20: note = Description of Artificial Sequence: Synthetic oligonucleotide
  misc_feature 1..20: note = Target: ANGPTL3; (+) strand; PAM type: NRG; PAM sequence: TGG
  source 1..20: mol_type = other DNA
tttcaaaagtctctatcacc

SEQ ID NO: 9940 - DNA, 20 bp, synthetic construct
  misc_feature 1..20: note = Description of Artificial Sequence: Synthetic oligonucleotide
  misc_feature 1..20: note = Target: ANGPTL3; (+) strand; PAM type: NRG; PAM sequence: CAG
  source 1..20: mol_type = other DNA
ctggccccaaattacctctt

SEQ ID NO: 9941 - DNA, 20 bp, synthetic construct
  misc_feature 1..20: note = Description of Artificial Sequence: Synthetic oligonucleotide
  misc_feature 1..20: note = Target: ANGPTL3; (+) strand; PAM type: NRG; PAM sequence: TAG
  source 1..20: mol_type = other DNA
cctaatgtattccatttgtc

SEQ ID NO: 9942 - DNA, 20 bp, synthetic construct
  misc_feature 1..20: note = Description of Artificial Sequence: Synthetic oligonucleotide
  misc_feature 1..20: note = Target: ANGPTL3; (+) strand; PAM type: NRG; PAM sequence: TGG
  source 1..20: mol_type = other DNA
tctccccacacatttctgat

SEQ ID NO: 9943 - DNA, 20 bp, synthetic construct
  misc_feature 1..20: note = Description of Artificial Sequence: Synthetic oligonucleotide
  misc_feature 1..20: note = Target: ANGPTL3; (+) strand; PAM type: NRG; PAM sequence: TAG
  source 1..20: mol_type = other DNA
cccacacatttctgattggc

SEQ ID NO: 9944 - DNA, 20 bp, synthetic construct
  misc_feature 1..20: note = Description of Artificial Sequence: Synthetic oligonucleotide
  misc_feature 1..20: note = Target: ANGPTL3; (+) strand; PAM type: NRG; PAM sequence: AAG
  source 1..20: mol_type = other DNA
gctagattgtgccgtatttt

SEQ ID NO: 9945 - DNA, 20 bp, synthetic construct
  misc_feature 1..20: note = Description of Artificial Sequence: Synthetic oligonucleotide
  misc_feature 1..20: note = Target: ANGPTL3; (+) strand; PAM type: NRG; PAM sequence: AGG
  source 1..20: mol_type = other DNA
ctagattgtgccgtatttta

SEQ ID NO: 9946 - DNA, 20 bp, synthetic construct
  misc_feature 1..20: note = Description of Artificial Sequence: Synthetic oligonucleotide
  misc_feature 1..20: note = Target: ANGPTL3; (+) strand; PAM type: NRG; PAM sequence: CAG
  source 1..20: mol_type = other DNA
ttgtgccgtattttaaggtg

SEQ ID NO: 9947 - DNA, 20 bp, synthetic construct
  misc_feature 1..20: note = Description of Artificial Sequence: Synthetic oligonucleotide
  misc_feature 1..20: note = Target: ANGPTL3; (+) strand; PAM type: NRG; PAM sequence: TAG
  source 1..20: mol_type = other DNA
caattcttccacaaatattc

SEQ ID NO: 9948 - DNA, 20 bp, synthetic construct
  misc_feature 1..20: note = Description of Artificial Sequence: Synthetic oligonucleotide
  misc_feature 1..20: note = Target: ANGPTL3; (+) strand; PAM type: NRG; PAM sequence: TGG
  source 1..20: mol_type = other DNA
tccacaaatattctagtaaa

SEQ ID NO: 9949 - DNA, 20 bp, synthetic construct
  misc_feature 1..20: note = Description of Artificial Sequence: Synthetic oligonucleotide
  misc_feature 1..20: note = Target: ANGPTL3; (+) strand; PAM type: NRG; PAM sequence: CAG
  source 1..20: mol_type = other DNA
acaaatattctagtaaatgg

SEQ ID NO: 9950 - DNA, 20 bp, synthetic construct
  misc_feature 1..20: note = Description of Artificial Sequence: Synthetic oligonucleotide
  misc_feature 1..20: note = Target: ANGPTL3; (+) strand; PAM type: NRG; PAM sequence: CAG
  source 1..20: mol_type = other DNA
cttgttcatctgaaaccaca

SEQ ID NO: 9951 - DNA, 20 bp, synthetic construct
  misc_feature 1..20: note = Description of Artificial Sequence: Synthetic oligonucleotide
  misc_feature 1..20: note = Target: ANGPTL3; (+) strand; PAM type: NRG; PAM sequence: TGG
  source 1..20: mol_type = other DNA
tactgtccatacacctcaaa

SEQ ID NO: 9952 - DNA, 20 bp, synthetic construct
  misc_feature 1..20: note = Description of Artificial Sequence: Synthetic oligonucleotide
  misc_feature 1..20: note = Target: ANGPTL3; (+) strand; PAM type: NRG; PAM sequence: TAG
  source 1..20: mol_type = other DNA
catacacctcaaatggcact

SEQ ID NO: 9953 - DNA, 20 bp, synthetic construct
  misc_feature 1..20: note = Description of Artificial Sequence: Synthetic oligonucleotide
  misc_feature 1..20: note = Target: ANGPTL3; (+) strand; PAM type: NRG; PAM sequence: GAG
  source 1..20: mol_type = other DNA
cacctcaaatggcacttagt

SEQ ID NO: 9954 - DNA, 20 bp, synthetic construct
  misc_feature 1..20: note = Description of Artificial Sequence: Synthetic oligonucleotide
  misc_feature 1..20: note = Target: ANGPTL3; (+) strand; PAM type: NRG; PAM sequence: CAG
  source 1..20: mol_type = other DNA
gcacttagtgagaaaataca

SEQ ID NO: 9955 - DNA, 20 bp, synthetic construct
  misc_feature 1..20: note = Description of Artificial Sequence: Synthetic oligonucleotide
  misc_feature 1..20: note = Target: ANGPTL3; (+) strand; PAM type: NRG; PAM sequence: TGG
  source 1..20: mol_type = other DNA
gtgagaaaatacacagaata

SEQ ID NO: 9956 - DNA, 20 bp, synthetic construct
  misc_feature 1..20: note = Description of Artificial Sequence: Synthetic oligonucleotide
  misc_feature 1..20: note = Target: ANGPTL3; (+) strand; PAM type: NRG; PAM sequence: TAG
  source 1..20: mol_type = other DNA
ataataaaaattctgaaaaa

SEQ ID NO: 9957 - DNA, 20 bp, synthetic construct
  misc_feature 1..20: note = Description of Artificial Sequence: Synthetic oligonucleotide
  misc_feature 1..20: note = Target: ANGPTL3; (+) strand; PAM type: NRG; PAM sequence: AAG
  source 1..20: mol_type = other DNA
attctgaaaaatagtactaa

SEQ ID NO: 9958 - DNA, 20 bp, synthetic construct
  misc_feature 1..20: note = Description of Artificial Sequence: Synthetic oligonucleotide
  misc_feature 1..20: note = Target: ANGPTL3; (+) strand; PAM type: NRG; PAM sequence: AAG
  source 1..20: mol_type = other DNA
aatagtactaaaagctccaa

SEQ ID NO: 9959 - DNA, 20 bp, synthetic construct
  misc_feature 1..20: note = Description of Artificial Sequence: Synthetic oligonucleotide
  misc_feature 1..20: note = Target: ANGPTL3; (+) strand; PAM type: NRG; PAM sequence: AAG
  source 1..20: mol_type = other DNA
taaaagctccaaaagcatca

SEQ ID NO: 9960 - DNA, 20 bp, synthetic construct
  misc_feature 1..20: note = Description of Artificial Sequence: Synthetic oligonucleotide
  misc_feature 1..20: note = Target: ANGPTL3; (+) strand; PAM type: NRG; PAM sequence: TAG
  source 1..20: mol_type = other DNA
agctccaaaagcatcaaaga

SEQ ID NO: 9961 - DNA, 20 bp, synthetic construct
  misc_feature 1..20: note = Description of Artificial Sequence: Synthetic oligonucleotide
  misc_feature 1..20: note = Target: ANGPTL3; (+) strand; PAM type: NRG; PAM sequence: CAG
  source 1..20: mol_type = other DNA
ccaaaagcatcaaagatagt

SEQ ID NO: 9962 - DNA, 20 bp, synthetic construct
  misc_feature 1..20: note = Description of Artificial Sequence: Synthetic oligonucleotide
  misc_feature 1..20: note = Target: ANGPTL3; (+) strand; PAM type: NRG; PAM sequence: TAG
  source 1..20: mol_type = other DNA
atagtcagtttacctgattt

SEQ ID NO: 9963 - DNA, 20 bp, synthetic construct
  misc_feature 1..20: note = Description of Artificial Sequence: Synthetic oligonucleotide
  misc_feature 1..20: note = Target: ANGPTL3; (+) strand; PAM type: NRG; PAM sequence: AAG
  source 1..20: mol_type = other DNA
tactgaaaaatttctatatc

SEQ ID NO: 9964 - DNA, 20 bp, synthetic construct
  misc_feature 1..20: note = Description of Artificial Sequence: Synthetic oligonucleotide
  misc_feature 1..20: note = Target: ANGPTL3; (+) strand; PAM type: NRG; PAM sequence: GAG
  source 1..20: mol_type = other DNA
ctgaaaaatttctatatcaa

SEQ ID NO: 9965 - DNA, 20 bp, synthetic construct
  misc_feature 1..20: note = Description of Artificial Sequence: Synthetic oligonucleotide
  misc_feature 1..20: note = Target: ANGPTL3; (+) strand; PAM type: NRG; PAM sequence: CAG
  source 1..20: mol_type = other DNA
atcaagagtttattttgaac

SEQ ID NO: 9966 - DNA, 20 bp, synthetic construct
  misc_feature 1..20: note = Description of Artificial Sequence: Synthetic oligonucleotide
  misc_feature 1..20: note = Target: ANGPTL3; (+) strand; PAM type: NRG; PAM sequence: AAG
  source 1..20: mol_type = other DNA
gtatgaattttactgaaacc

SEQ ID NO: 9967 - DNA, 20 bp, synthetic construct
  misc_feature 1..20: note = Description of Artificial Sequence: Synthetic oligonucleotide
  misc_feature 1..20: note = Target: ANGPTL3; (+) strand; PAM type: NRG; PAM sequence: GAG
  source 1..20: mol_type = other DNA
gtacacacatgtctcattat

SEQ ID NO: 9968 - DNA, 20 bp, synthetic construct
  misc_feature 1..20: note = Description of Artificial Sequence: Synthetic oligonucleotide
  misc_feature 1..20: note = Target: ANGPTL3; (+) strand; PAM type: NRG; PAM sequence: AGG
  source 1..20: mol_type = other DNA
tacacacatgtctcattatg

SEQ ID NO: 9969 - DNA, 20 bp, synthetic construct
  misc_feature 1..20: note = Description of Artificial Sequence: Synthetic oligonucleotide
  misc_feature 1..20: note = Target: ANGPTL3; (+) strand; PAM type: NRG; PAM sequence: TAG
  source 1..20: mol_type = other DNA
tgtctcattatgaggtaatc

SEQ ID NO: 9970 - DNA, 20 bp, synthetic construct
  misc_feature 1..20: note = Description of Artificial Sequence: Synthetic oligonucleotide
  misc_feature 1..20: note = Target: ANGPTL3; (+) strand; PAM type: NRG; PAM sequence: TAG
  source 1..20: mol_type = other DNA
cattatgaggtaatctagtg

SEQ ID NO: 9971 - DNA, 20 bp, synthetic construct
  misc_feature 1..20: note = Description of Artificial Sequence: Synthetic oligonucleotide
  misc_feature 1..20: note = Target: ANGPTL3; (+) strand; PAM type: NRG; PAM sequence: TGG
  source 1..20: mol_type = other DNA
ttccatacactctgtcatcc

SEQ ID NO: 9972 - DNA, 20 bp, synthetic construct
  misc_feature 1..20: note = Description of Artificial Sequence: Synthetic oligonucleotide
  misc_feature 1..20: note = Target: ANGPTL3; (+) strand; PAM type: NRG; PAM sequence: CAG
  source 1..20: mol_type = other DNA
acactctgtcatcctggaat

SEQ ID NO: 9973 - DNA, 20 bp, synthetic construct
  misc_feature 1..20: note = Description of Artificial Sequence: Synthetic oligonucleotide
  misc_feature 1..20: note = Target: ANGPTL3; (+) strand; PAM type: NRG; PAM sequence: TAG
  source 1..20: mol_type = other DNA
cttgtatctttacttcctaa

SEQ ID NO: 9974 - DNA, 20 bp, synthetic construct
  misc_feature 1..20: note = Description of Artificial Sequence: Synthetic oligonucleotide
  misc_feature 1..20: note = Target: ANGPTL3; (+) strand; PAM type: NRG; PAM sequence: TGG
  source 1..20: mol_type = other DNA
cttcctaatagcataactca

SEQ ID NO: 9975 - DNA, 20 bp, synthetic construct
  misc_feature 1..20: note = Description of Artificial Sequence: Synthetic oligonucleotide
  misc_feature 1..20: note = Target: ANGPTL3; (+) strand; PAM type: NRG; PAM sequence: AAG
  source 1..20: mol_type = other DNA
cctaatagcataactcatgg

SEQ ID NO: 9976 - DNA, 20 bp, synthetic construct
  misc_feature 1..20: note = Description of Artificial Sequence: Synthetic oligonucleotide
  misc_feature 1..20: note = Target: ANGPTL3; (+) strand; PAM type: NRG; PAM sequence: TAG
  source 1..20: mol_type = other DNA
actaactcattcattaattt

SEQ ID NO: 9977 - DNA, 20 bp, synthetic construct
  misc_feature 1..20: note = Description of Artificial Sequence: Synthetic oligonucleotide
  misc_feature 1..20: note = Target: ANGPTL3; (+) strand; PAM type: NRG; PAM sequence: TGG
  source 1..20: mol_type = other DNA
tcattcattaattttagaaa

SEQ ID NO: 9978 - DNA, 20 bp, synthetic construct
  misc_feature 1..20: note = Description of Artificial Sequence: Synthetic oligonucleotide
  misc_feature 1..20: note = Target: ANGPTL3; (+) strand; PAM type: NRG; PAM sequence: GAG
  source 1..20: mol_type = other DNA
ttcattaaacaacacttatt

SEQ ID NO: 9979 - DNA, 20 bp, synthetic construct
  misc_feature 1..20: note = Description of Artificial Sequence: Synthetic oligonucleotide
  misc_feature 1..20: note = Target: ANGPTL3; (+) strand; PAM type: NRG; PAM sequence: TAG
  source 1..20: mol_type = other DNA
atatactctaccttctgctg

SEQ ID NO: 9980 - DNA, 20 bp, synthetic construct
  misc_feature 1..20: note = Description of Artificial Sequence: Synthetic oligonucleotide
  misc_feature 1..20: note = Target: ANGPTL3; (+) strand; PAM type: NRG; PAM sequence: AGG
  source 1..20: mol_type = other DNA
tatactctaccttctgctgt

SEQ ID NO: 9981 - DNA, 20 bp, synthetic construct
  misc_feature 1..20: note = Description of Artificial Sequence: Synthetic oligonucleotide
  misc_feature 1..20: note = Target: ANGPTL3; (+) strand; PAM type: NRG; PAM sequence: CAG
  source 1..20: mol_type = other DNA
atttttttccccatcactaa

SEQ ID NO: 9982 - DNA, 20 bp, synthetic construct
  misc_feature 1..20: note = Description of Artificial Sequence: Synthetic oligonucleotide
  misc_feature 1..20: note = Target: ANGPTL3; (+) strand; PAM type: NRG; PAM sequence: GAG
  source 1..20: mol_type = other DNA
gcacttatgtatgtactact

SEQ ID NO: 9983 - DNA, 20 bp, synthetic construct
  misc_feature 1..20: note = Description of Artificial Sequence: Synthetic oligonucleotide
  misc_feature 1..20: note = Target: ANGPTL3; (+) strand; PAM type: NRG; PAM sequence: CAG
  source 1..20: mol_type = other DNA
tactgagtgattatcaaaca

SEQ ID NO: 9984 - DNA, 20 bp, synthetic construct
  misc_feature 1..20: note = Description of Artificial Sequence: Synthetic oligonucleotide
  misc_feature 1..20: note = Target: ANGPTL3; (+) strand; PAM type: NRG; PAM sequence: CAG
  source 1..20: mol_type = other DNA
tgagtgattatcaaacacag

SEQ ID NO: 9985 - DNA, 20 bp, synthetic construct
  misc_feature 1..20: note = Description of Artificial Sequence: Synthetic oligonucleotide
  misc_feature 1..20: note = Target: ANGPTL3; (+) strand; PAM type: NRG; PAM sequence: AAG
  source 1..20: mol_type = other DNA
acagcagttttaaaaatgaa

SEQ ID NO: 9986 - DNA, 20 bp, synthetic construct
  misc_feature 1..20: note = Description of Artificial Sequence: Synthetic oligonucleotide
  misc_feature 1..20: note = Target: ANGPTL3; (+) strand; PAM type: NRG; PAM sequence: AAG
  source 1..20: mol_type = other DNA
cagttttaaaaatgaaaaga

SEQ ID NO: 9987 - DNA, 20 bp, synthetic construct
  misc_feature 1..20: note = Description of Artificial Sequence: Synthetic oligonucleotide
  misc_feature 1..20: note = Target: ANGPTL3; (+) strand; PAM type: NRG; PAM sequence: TGG
  source 1..20: mol_type = other DNA
aaagaaagtgacccaacaat

SEQ ID NO: 9988 - DNA, 20 bp, synthetic construct
  misc_feature 1..20: note = Description of Artificial Sequence: Synthetic oligonucleotide
  misc_feature 1..20: note = Target: ANGPTL3; (+) strand; PAM type: NRG; PAM sequence: AAG
  source 1..20: mol_type = other DNA
aacaattggcccttttatca

SEQ ID NO: 9989 - DNA, 20 bp, synthetic construct
  misc_feature 1..20: note = Description of Artificial Sequence: Synthetic oligonucleotide
  misc_feature 1..20: note = Target: ANGPTL3; (+) strand; PAM type: NRG; PAM sequence: AAG
  source 1..20: mol_type = other DNA
ggcccttttatcaaagtcca

SEQ ID NO: 9990 - DNA, 20 bp, synthetic construct
  misc_feature 1..20: note = Description of Artificial Sequence: Synthetic oligonucleotide
  misc_feature 1..20: note = Target: ANGPTL3; (+) strand; PAM type: NRG; PAM sequence: TGG
  source 1..20: mol_type = other DNA
caaagtccaaagtattatca

SEQ ID NO: 9991 - DNA, 20 bp, synthetic construct
  misc_feature 1..20: note = Description of Artificial Sequence: Synthetic oligonucleotide
  misc_feature 1..20: note = Target: ANGPTL3; (+) strand; PAM type: NRG; PAM sequence: TAG
  source 1..20: mol_type = other DNA
tattatcatggcaaatcaac

SEQ ID NO: 9992 - DNA, 20 bp, synthetic construct
  misc_feature 1..20: note = Description of Artificial Sequence: Synthetic oligonucleotide
  misc_feature 1..20: note = Target: ANGPTL3; (+) strand; PAM type: NRG; PAM sequence: AGG
  source 1..20: mol_type = other DNA
attatcatggcaaatcaact

SEQ ID NO: 9993 - DNA, 20 bp, synthetic construct
  misc_feature 1..20: note = Description of Artificial Sequence: Synthetic oligonucleotide
  misc_feature 1..20: note = Target: ANGPTL3; (+) strand; PAM type: NRG; PAM sequence: GGG
  source 1..20: mol_type = other DNA
ttatcatggcaaatcaacta

SEQ ID NO: 9994 - DNA, 20 bp, synthetic construct
  misc_feature 1..20: note = Description of Artificial Sequence: Synthetic oligonucleotide
  misc_feature 1..20: note = Target: ANGPTL3; (+) strand; PAM type: NRG; PAM sequence: TGG
  source 1..20: mol_type = other DNA
ctagggtaaaattacttaac

SEQ ID NO: 9995 - DNA, 20 bp, synthetic construct
  misc_feature 1..20: note = Description of Artificial Sequence: Synthetic oligonucleotide
  misc_feature 1..20: note = Target: ANGPTL3; (+) strand; PAM type: NRG; PAM sequence: CAG
  source 1..20: mol_type = other DNA
aaaattacttaactggtgca

SEQ ID NO: 9996 - DNA, 20 bp, synthetic construct
  misc_feature 1..20: note = Description of Artificial Sequence: Synthetic oligonucleotide
  misc_feature 1..20: note = Target: ANGPTL3; (+) strand; PAM type: NRG; PAM sequence: AAG
  source 1..20: mol_type = other DNA
acttaactggtgcacagttc

SEQ ID NO: 9997 - DNA, 20 bp, synthetic construct
  misc_feature 1..20: note = Description of Artificial Sequence: Synthetic oligonucleotide
  misc_feature 1..20: note = Target: ANGPTL3; (+) strand; PAM type: NRG; PAM sequence: AGG
  source 1..20: mol_type = other DNA
cttaactggtgcacagttca

SEQ ID NO: 9998 - DNA, 20 bp, synthetic construct
  misc_feature 1..20: note = Description of Artificial Sequence: Synthetic oligonucleotide
  misc_feature 1..20: note = Target: ANGPTL3; (+) strand; PAM type: NRG; PAM sequence: AAG
  source 1..20: mol_type = other DNA
tgcacagttcaaggtcatga

SEQ ID NO: 9999 - DNA, 20 bp, synthetic construct
  misc_feature 1..20: note = Description of Artificial Sequence: Synthetic oligonucleotide
  misc_feature 1..20: note = Target: ANGPTL3; (+) strand; PAM type: NRG; PAM sequence: TAG
  source 1..20: mol_type = other DNA
acagttcaaggtcatgaaag

SEQ ID NO: 10000 - DNA, 20 bp, synthetic construct
  misc_feature 1..20: note = Description of Artificial Sequence: Synthetic oligonucleotide
  misc_feature 1..20: note = Target: ANGPTL3; (+) strand; PAM type: NRG; PAM sequence: GAG
  source 1..20: mol_type = other DNA
attataacccttaataaaat

SEQ ID NO: 10001 - DNA, 20 bp, synthetic construct
  misc_feature 1..20: note = Description of Artificial Sequence: Synthetic oligonucleotide
  misc_feature 1..20: note = Target: ANGPTL3; (+) strand; PAM type: NRG; PAM sequence: AGG
  source 1..20: mol_type = other DNA
ttataacccttaataaaatg

SEQ ID NO: 10002 - DNA, 20 bp, synthetic construct
  misc_feature 1..20: note = Description of Artificial Sequence: Synthetic oligonucleotide
  misc_feature 1..20: note = Target: ANGPTL3; (+) strand; PAM type: NRG; PAM sequence: TAG
  source 1..20: mol_type = other DNA
atgaggttttaatgacattt

SEQ ID NO: 10003 - DNA, 20 bp, synthetic construct
  misc_feature 1..20: note = Description of Artificial Sequence: Synthetic oligonucleotide
  misc_feature 1..20: note = Target: ANGPTL3; (+) strand; PAM type: NRG; PAM sequence: AGG
  source 1..20: mol_type = other DNA
tgaggttttaatgacatttt

SEQ ID NO: 10004 - DNA, 20 bp, synthetic construct
  misc_feature 1..20: note = Description of Artificial Sequence: Synthetic oligonucleotide
  misc_feature 1..20: note = Target: ANGPTL3; (+) strand; PAM type: NRG; PAM sequence: AAG
  source 1..20: mol_type = other DNA
aggaaatataaaataaactt

SEQ ID NO: 10005 - DNA, 20 bp, synthetic construct
  misc_feature 1..20: note = Description of Artificial Sequence: Synthetic oligonucleotide
  misc_feature 1..20: note = Target: ANGPTL3; (+) strand; PAM type: NRG; PAM sequence: AAG
  source 1..20: mol_type = other DNA
agaattctatctaaaataca

SEQ ID NO: 10006 - DNA, 20 bp, synthetic construct
  misc_feature 1..20: note = Description of Artificial Sequence: Synthetic oligonucleotide
  misc_feature 1..20: note = Target: ANGPTL3; (+) strand; PAM type: NRG; PAM sequence: AGG
  source 1..20: mol_type = other DNA
gaattctatctaaaatacaa

SEQ ID NO: 10007 - DNA, 20 bp, synthetic construct
  misc_feature 1..20: note = Description of Artificial Sequence: Synthetic oligonucleotide
  misc_feature 1..20: note = Target: ANGPTL3; (+) strand; PAM type: NRG; PAM sequence: TAG
  source 1..20: mol_type = other DNA
gtttttcctaaattcatgtt

SEQ ID NO: 10008 - DNA, 20 bp, synthetic construct
  misc_feature 1..20: note = Description of Artificial Sequence: Synthetic oligonucleotide
  misc_feature 1..20: note = Target: ANGPTL3; (+) strand; PAM type: NRG; PAM sequence: AAG
  source 1..20: mol_type = other DNA
ctaaattcatgtttagtcct

SEQ ID NO: 10009 - DNA, 20 bp, synthetic construct
  misc_feature 1..20: note = Description of Artificial Sequence: Synthetic oligonucleotide
  misc_feature 1..20: note = Target: ANGPTL3; (+) strand; PAM type: NRG; PAM sequence: CAG
  source 1..20: mol_type = other DNA
ttcatgtttagtcctaagaa

SEQ ID NO: 10010 - DNA, 20 bp, synthetic construct
  misc_feature 1..20: note = Description of Artificial Sequence: Synthetic oligonucleotide
  misc_feature 1..20: note = Target: ANGPTL3; (+) strand; PAM type: NRG; PAM sequence: TGG
  source 1..20: mol_type = other DNA
catacatctaataaaatgac

SEQ ID NO: 10011 - DNA, 20 bp, synthetic construct
  misc_feature 1..20: note = Description of Artificial Sequence: Synthetic oligonucleotide
  misc_feature 1..20: note = Target: ANGPTL3; (+) strand; PAM type: NRG; PAM sequence: GGG
  source 1..20: mol_type = other DNA
atacatctaataaaatgact

SEQ ID NO: 10012 - DNA, 20 bp, synthetic construct
  misc_feature 1..20: note = Description of Artificial Sequence: Synthetic oligonucleotide
  misc_feature 1..20: note = Target: ANGPTL3; (+) strand; PAM type: NRG; PAM sequence: AAG
  source 1..20: mol_type = other DNA
tgactgggtatataatttga

SEQ ID NO: 10013 - DNA, 20 bp, synthetic construct
  misc_feature 1..20: note = Description of Artificial Sequence: Synthetic oligonucleotide
  misc_feature 1..20: note = Target: ANGPTL3; (+) strand; PAM type: NRG; PAM sequence: GAG
  source 1..20: mol_type = other DNA
actgggtatataatttgaaa

SEQ ID NO: 10014 - DNA, 20 bp, synthetic construct
  misc_feature 1..20: note = Description of Artificial Sequence: Synthetic oligonucleotide
  misc_feature 1..20: note = Target: ANGPTL3; (+) strand; PAM type: NRG; PAM sequence: AAG
  source 1..20: mol_type = other DNA
agcaataaattactaccttg

SEQ ID NO: 10015 - DNA, 20 bp, synthetic construct
  misc_feature 1..20: note = Description of Artificial Sequence: Synthetic oligonucleotide
  misc_feature 1..20: note = Target: ANGPTL3; (+) strand; PAM type: NRG; PAM sequence: AAG
  source 1..20: mol_type = other DNA
aattactaccttgaagatgt

SEQ ID NO: 10016 - DNA, 20 bp, synthetic construct
  misc_feature 1..20: note = Description of Artificial Sequence: Synthetic oligonucleotide
  misc_feature 1..20: note = Target: ANGPTL3; (+) strand; PAM type: NRG; PAM sequence: AGG
  source 1..20: mol_type = other DNA
attactaccttgaagatgta

SEQ ID NO: 10017 - DNA, 20 bp, synthetic construct
  misc_feature 1..20: note = Description of Artificial Sequence: Synthetic oligonucleotide
  misc_feature 1..20: note = Target: ANGPTL3; (+) strand; PAM type: NRG; PAM sequence: TAG
  source 1..20: mol_type = other DNA
accttgaagatgtaaggttg

SEQ ID NO: 10018 - DNA, 20 bp, synthetic construct
  misc_feature 1..20: note = Description of Artificial Sequence: Synthetic oligonucleotide
  misc_feature 1..20: note = Target: ANGPTL3; (+) strand; PAM type: NRG; PAM sequence: CAG
  source 1..20: mol_type = other DNA
gctatttatcttaaaataca

SEQ ID NO: 10019 - DNA, 20 bp, synthetic construct
  misc_feature 1..20: note = Description of Artificial Sequence: Synthetic oligonucleotide
  misc_feature 1..20: note = Target: ANGPTL3; (+) strand; PAM type: NRG; PAM sequence: CAG
  source 1..20: mol_type = other DNA
taaaatacacagtcaaacct

SEQ ID NO: 10020 - DNA, 20 bp, synthetic construct
  misc_feature 1..20: note = Description of Artificial Sequence: Synthetic oligonucleotide
  misc_feature 1..20: note = Target: ANGPTL3; (+) strand; PAM type: NRG; PAM sequence: TAG
  source 1..20: mol_type = other DNA
acctcagtttccacacccaa

SEQ ID NO: 10021 - DNA, 20 bp, synthetic construct
  misc_feature 1..20: note = Description of Artificial Sequence: Synthetic oligonucleotide
  misc_feature 1..20: note = Target: ANGPTL3; (+) strand; PAM type: NRG; PAM sequence: TGG
  source 1..20: mol_type = other DNA
cagtttccacacccaataga

SEQ ID NO: 10022 - DNA, 20 bp, synthetic construct
  misc_feature 1..20: note = Description of Artificial Sequence: Synthetic oligonucleotide
  misc_feature 1..20: note = Target: ANGPTL3; (+) strand; PAM type: NRG; PAM sequence: GGG
  source 1..20: mol_type = other DNA
agtttccacacccaatagat

SEQ ID NO: 10023 - DNA, 20 bp, synthetic construct
  misc_feature 1..20: note = Description of Artificial Sequence: Synthetic oligonucleotide
  misc_feature 1..20: note = Target: ANGPTL3; (+) strand; PAM type: NRG; PAM sequence: TGG
  source 1..20: mol_type = other DNA
tcaaatctattaatacttca

SEQ ID NO: 10024 - DNA, 20 bp, synthetic construct
  misc_feature 1..20: note = Description of Artificial Sequence: Synthetic oligonucleotide
  misc_feature 1..20: note = Target: ANGPTL3; (+) strand; PAM type: NRG; PAM sequence: GGG
  source 1..20: mol_type = other DNA
caaatctattaatacttcat

SEQ ID NO: 10025 - DNA, 20 bp, synthetic construct
  misc_feature 1..20: note = Description of Artificial Sequence: Synthetic oligonucleotide
  misc_feature 1..20: note = Target: ANGPTL3; (+) strand; PAM type: NRG; PAM sequence: AAG
  source 1..20: mol_type = other DNA
ttcatgggattgtaatcatc

SEQ ID NO: 10026 - DNA, 20 bp, synthetic construct
  misc_feature 1..20: note = Description of Artificial Sequence: Synthetic oligonucleotide
  misc_feature 1..20: note = Target: ANGPTL3; (+) strand; PAM type: NRG; PAM sequence: CAG
  source 1..20: mol_type = other DNA
tgggattgtaatcatcaagc

SEQ ID NO: 10027 - DNA, 20 bp, synthetic construct
  misc_feature 1..20: note = Description of Artificial Sequence: Synthetic oligonucleotide
  misc_feature 1..20: note = Target: ANGPTL3; (+) strand; PAM type: NRG; PAM sequence: TAG
  source 1..20: mol_type = other DNA
agccagataatgtatttgaa

SEQ ID NO: 10028 - DNA, 20 bp, synthetic construct
  misc_feature 1..20: note = Description of Artificial Sequence: Synthetic oligonucleotide
  misc_feature 1..20: note = Target: ANGPTL3; (+) strand; PAM type: NRG; PAM sequence: AAG
  source 1..20: mol_type = other DNA
gaatagctttatgaactata

SEQ ID NO: 10029 - DNA, 20 bp, synthetic construct
  misc_feature 1..20: note = Description of Artificial Sequence: Synthetic oligonucleotide
  misc_feature 1..20: note = Target: ANGPTL3; (+) strand; PAM type: NRG; PAM sequence: CAG
  source 1..20: mol_type = other DNA
atgtatatactttttaaaaa

SEQ ID NO: 10030 - DNA, 20 bp, synthetic construct
  misc_feature 1..20: note = Description of Artificial Sequence: Synthetic oligonucleotide
  misc_feature 1..20: note = Target: ANGPTL3; (+) strand; PAM type: NRG; PAM sequence: AGG
  source 1..20: mol_type = other DNA
tgtatatactttttaaaaac

SEQ ID NO: 10031 - DNA, 20 bp, synthetic construct
  misc_feature 1..20: note = Description of Artificial Sequence: Synthetic oligonucleotide
  misc_feature 1..20: note = Target: ANGPTL3; (+) strand; PAM type: NRG; PAM sequence: AAG
  source 1..20: mol_type = other DNA
gtcatttttcacattccttt

SEQ ID NO: 10032 - DNA, 20 bp, synthetic construct
  misc_feature 1..20: note = Description of Artificial Sequence: Synthetic oligonucleotide
  misc_feature 1..20: note = Target: ANGPTL3; (+) strand; PAM type: NRG; PAM sequence: CAG
  source 1..20: mol_type = other DNA
actgaacatattataattct

SEQ ID NO: 10033 - DNA, 20 bp, synthetic construct
  misc_feature 1..20: note = Description of Artificial Sequence: Synthetic oligonucleotide
  misc_feature 1..20: note = Target: ANGPTL3; (+) strand; PAM type: NRG; PAM sequence: AGG
  source 1..20: mol_type = other DNA
ctgaacatattataattctc

SEQ ID NO: 10034 - DNA, 20 bp, synthetic construct
  misc_feature 1..20: note = Description of Artificial Sequence: Synthetic oligonucleotide
  misc_feature 1..20: note = Target: ANGPTL3; (+) strand; PAM type: NRG; PAM sequence: CAG
  source 1..20: mol_type = other DNA
acatattataattctcagga

SEQ ID NO: 10035 - DNA, 20 bp, synthetic construct
  misc_feature 1..20: note = Description of Artificial Sequence: Synthetic oligonucleotide
  misc_feature 1..20: note = Target: ANGPTL3; (+) strand; PAM type: NRG; PAM sequence: AAG
  source 1..20: mol_type = other DNA
tattataattctcaggacag

SEQ ID NO: 10036 - DNA, 20 bp, synthetic construct
  misc_feature 1..20: note = Description of Artificial Sequence: Synthetic oligonucleotide
  misc_feature 1..20: note = Target: ANGPTL3; (+) strand; PAM type: NRG; PAM sequence: CAG
  source 1..20: mol_type = other DNA
aagaacaaaactgcccttct

SEQ ID NO: 10037 - DNA, 20 bp, synthetic construct
  misc_feature 1..20: note = Description of Artificial Sequence: Synthetic oligonucleotide
  misc_feature 1..20: note = Target: ANGPTL3; (+) strand; PAM type: NRG; PAM sequence: GAG
  source 1..20: mol_type = other DNA
gaacaaaactgcccttctca

SEQ ID NO: 10038 - DNA, 20 bp, synthetic construct
  misc_feature 1..20: note = Description of Artificial Sequence: Synthetic oligonucleotide
  misc_feature 1..20: note = Target: ANGPTL3; (+) strand; PAM type: NRG; PAM sequence: TGG
  source 1..20: mol_type = other DNA
tcagagtttgcatctgtttc

SEQ ID NO: 10039 - DNA, 20 bp, synthetic construct
  misc_feature 1..20: note = Description of Artificial Sequence: Synthetic oligonucleotide
  misc_feature 1..20: note = Target: ANGPTL3; (+) strand; PAM type: NRG; PAM sequence: AAG
  source 1..20: mol_type = other DNA
actccttcccttcacaatct

SEQ ID NO: 10040 - DNA, 20 bp, synthetic construct
  misc_feature 1..20: note = Description of Artificial Sequence: Synthetic oligonucleotide
  misc_feature 1..20: note = Target: ANGPTL3; (+) strand; PAM type: NRG; PAM sequence: CAG
  source 1..20: mol_type = other DNA
agataacactccatcacctt

SEQ ID NO: 10041 - DNA, 20 bp, synthetic construct
  misc_feature 1..20: note = Description of Artificial Sequence: Synthetic oligonucleotide
  misc_feature 1..20: note = Target: ANGPTL3; (+) strand; PAM type: NRG; PAM sequence: AAG
  source 1..20: mol_type = other DNA
actccatcaccttcagatgc

SEQ ID NO: 10042 - DNA, 20 bp, synthetic construct
  misc_feature 1..20: note = Description of Artificial Sequence: Synthetic oligonucleotide
  misc_feature 1..20: note = Target: ANGPTL3; (+) strand; PAM type: NRG; PAM sequence: TGG
  source 1..20: mol_type = other DNA
agcccctaactaaaaacttc

SEQ ID NO: 10043 - DNA, 20 bp, synthetic construct
  misc_feature 1..20: note = Description of Artificial Sequence: Synthetic oligonucleotide
  misc_feature 1..20: note = Target: ANGPTL3; (+) strand; PAM type: NRG; PAM sequence: GGG
  source 1..20: mol_type = other DNA
gcccctaactaaaaacttct

SEQ ID NO: 10044 - DNA, 20 bp, synthetic construct
  misc_feature 1..20: note = Description of Artificial Sequence: Synthetic oligonucleotide
  misc_feature 1..20: note = Target: ANGPTL3; (+) strand; PAM type: NRG; PAM sequence: TGG
  source 1..20: mol_type = other DNA
cctaactaaaaacttctggg

SEQ ID NO: 10045 - DNA, 20 bp, synthetic construct
  misc_feature 1..20: note = Description of Artificial Sequence: Synthetic oligonucleotide
  misc_feature 1..20: note = Target: ANGPTL3; (+) strand; PAM type: NRG; PAM sequence: TAG
  source 1..20: mol_type = other DNA
gggtggctatgttaaaatgt

SEQ ID NO: 10046 - DNA, 20 bp, synthetic construct
  misc_feature 1..20: note = Description of Artificial Sequence: Synthetic oligonucleotide
  misc_feature 1..20: note = Target: ANGPTL3; (+) strand; PAM type: NRG; PAM sequence: AGG
  source 1..20: mol_type = other DNA
ggtggctatgttaaaatgtt

SEQ ID NO: 10047 - DNA, 20 bp, synthetic construct
  misc_feature 1..20: note = Description of Artificial Sequence: Synthetic oligonucleotide
  misc_feature 1..20: note = Target: ANGPTL3; (+) strand; PAM type: NRG; PAM sequence: TAG
  source 1..20: mol_type = other DNA
tatgttaaaatgttaggaaa

SEQ ID NO: 10048 - DNA, 20 bp, synthetic construct
  misc_feature 1..20: note = Description of Artificial Sequence: Synthetic oligonucleotide
  misc_feature 1..20: note = Target: ANGPTL3; (+) strand; PAM type: NRG; PAM sequence: GAG
  source 1..20: mol_type = other DNA
tgttaaaatgttaggaaata

SEQ ID NO: 10049 - DNA, 20 bp, synthetic construct
  misc_feature 1..20: note = Description of Artificial Sequence: Synthetic oligonucleotide
  misc_feature 1..20: note = Target: ANGPTL3; (+) strand; PAM type: NRG; PAM sequence: CAG
  source 1..20: mol_type = other DNA
aggaaatagagctcttgact

SEQ ID NO: 10050 - DNA, 20 bp, synthetic construct
  misc_feature 1..20: note = Description of Artificial Sequence: Synthetic oligonucleotide
  misc_feature 1..20: note = Target: ANGPTL3; (+) strand; PAM type: NRG; PAM sequence: GAG
  source 1..20: mol_type = other DNA
tcagaattcttttttttttc

SEQ ID NO: 10051 - DNA, 20 bp, synthetic construct
  misc_feature 1..20: note = Description of Artificial Sequence: Synthetic oligonucleotide
  misc_feature 1..20: note = Target: ANGPTL3; (+) strand; PAM type: NRG; PAM sequence: TGG
  source 1..20: mol_type = other DNA
aattcttttttttttcgaga

SEQ ID NO: 10052 - DNA, 20 bp, synthetic construct
  misc_feature 1..20: note = Description of Artificial Sequence: Synthetic oligonucleotide
  misc_feature 1..20: note = Target: ANGPTL3; (+) strand; PAM type: NRG; PAM sequence: GAG
  source 1..20: mol_type = other DNA
ttcttttttttttcgagatg

SEQ ID NO: 10053 - DNA, 20 bp, synthetic construct
  misc_feature 1..20: note = Description of Artificial Sequence: Synthetic oligonucleotide
  misc_feature 1..20: note = Target: ANGPTL3; (+) strand; PAM type: NRG; PAM sequence: CAG
  source 1..20: mol_type = other DNA
tggagtctcgctctgtcacc

SEQ ID NO: 10054 - DNA, 20 bp, synthetic construct
  misc_feature 1..20: note = Description of Artificial Sequence: Synthetic oligonucleotide
  misc_feature 1..20: note = Target: ANGPTL3; (+) strand; PAM type: NRG; PAM sequence: AGG
  source 1..20: mol_type = other DNA
ggagtctcgctctgtcaccc

SEQ ID NO: 10055 - DNA, 20 bp, synthetic construct
  misc_feature 1..20: note = Description of Artificial Sequence: Synthetic oligonucleotide
  misc_feature 1..20: note = Target: ANGPTL3; (+) strand; PAM type: NRG; PAM sequence: TGG
  source 1..20: mol_type = other DNA
tctcgctctgtcacccaggc

SEQ ID NO: 10056 - DNA, 20 bp, synthetic construct
  misc_feature 1..20: note = Description of Artificial Sequence: Synthetic oligonucleotide
  misc_feature 1..20: note = Target: ANGPTL3; (+) strand; PAM type: NRG; PAM sequence: GAG
  source 1..20: mol_type = other DNA
tcgctctgtcacccaggctg

SEQ ID NO: 10057 - DNA, 20 bp, synthetic construct
  misc_feature 1..20: note = Description of Artificial Sequence: Synthetic oligonucleotide
  misc_feature 1..20: note = Target: ANGPTL3; (+) strand; PAM type: NRG; PAM sequence: CAG
  source 1..20: mol_type = other DNA
ctgtcacccaggctggagtg

SEQ ID NO: 10058 - DNA, 20 bp, synthetic construct
  misc_feature 1..20: note = Description of Artificial Sequence: Synthetic oligonucleotide
  misc_feature 1..20: note = Target: ANGPTL3; (+) strand; PAM type: NRG; PAM sequence: TGG
  source 1..20: mol_type = other DNA
tcacccaggctggagtgcag

SEQ ID NO: 10059 - DNA, 20 bp, synthetic construct
  misc_feature 1..20: note = Description of Artificial Sequence: Synthetic oligonucleotide
  misc_feature 1..20: note = Target: ANGPTL3; (+) strand; PAM type: NRG; PAM sequence: CAG
  source 1..20: mol_type = other DNA
tggagtgcagtggcactgca

SEQ ID NO: 10060 - DNA, 20 bp, synthetic construct
  misc_feature 1..20: note = Description of Artificial Sequence: Synthetic oligonucleotide
  misc_feature 1..20: note = Target: ANGPTL3; (+) strand; PAM type: NRG; PAM sequence: GAG
  source 1..20: mol_type = other DNA
gtgcagtggcactgcacagt

SEQ ID NO: 10061 - DNA, 20 bp, synthetic construct
  misc_feature 1..20: note = Description of Artificial Sequence: Synthetic oligonucleotide
  misc_feature 1..20: note = Target: ANGPTL3; (+) strand; PAM type: NRG; PAM sequence: GAG
  source 1..20: mol_type = other DNA
gtggcactgcacagtgagct

SEQ ID NO: 10062 - DNA, 20 bp, synthetic construct
  misc_feature 1..20: note = Description of Artificial Sequence: Synthetic oligonucleotide
  misc_feature 1..20: note = Target: ANGPTL3; (+) strand; PAM type: NRG; PAM sequence: CAG
  source 1..20: mol_type = other DNA
cacagtgagctgagtgatct

SEQ ID NO: 10063 - DNA, 20 bp, synthetic construct
  misc_feature 1..20: note = Description of Artificial Sequence: Synthetic oligonucleotide
  misc_feature 1..20: note = Target: ANGPTL3; (+) strand; PAM type: NRG; PAM sequence: TGG
  source 1..20: mol_type = other DNA
tctctgcaacctccgcctcc

SEQ ID NO: 10064 - DNA, 20 bp, synthetic construct
  misc_feature 1..20: note = Description of Artificial Sequence: Synthetic oligonucleotide
  misc_feature 1..20: note = Target: ANGPTL3; (+) strand; PAM type: NRG; PAM sequence: GGG
  source 1..20: mol_type = other DNA
ctctgcaacctccgcctcct

SEQ ID NO: 10065 - DNA, 20 bp, synthetic construct
  misc_feature 1..20: note = Description of Artificial Sequence: Synthetic oligonucleotide
  misc_feature 1..20: note = Target: ANGPTL3; (+) strand; PAM type: NRG; PAM sequence: AAG
  source 1..20: mol_type = other DNA
aacctccgcctcctgggttc

SEQ ID NO: 10066 - DNA, 20 bp, synthetic construct
  misc_feature 1..20: note = Description of Artificial Sequence: Synthetic oligonucleotide
  misc_feature 1..20: note = Target: ANGPTL3; (+) strand; PAM type: NRG; PAM sequence: CAG
  source 1..20: mol_type = other DNA
ttcaagtgattctcctgcct

SEQ ID NO: 10067 - DNA, 20 bp, synthetic construct
  misc_feature 1..20: note = Description of Artificial Sequence: Synthetic oligonucleotide
  misc_feature 1..20: note = Target: ANGPTL3; (+) strand; PAM type: NRG; PAM sequence: GAG
  source 1..20: mol_type = other DNA
ttctcctgcctcagactcct

SEQ ID NO: 10068 - DNA, 20 bp, synthetic construct
  misc_feature 1..20: note = Description of Artificial Sequence: Synthetic oligonucleotide
  misc_feature 1..20: note = Target: ANGPTL3; (+) strand; PAM type: NRG; PAM sequence: TAG
  source 1..20: mol_type = other DNA
tcctgcctcagactcctgag

SEQ ID NO: 10069 - DNA, 20 bp, synthetic construct
  misc_feature 1..20: note = Description of Artificial Sequence: Synthetic oligonucleotide
  misc_feature 1..20: note = Target: ANGPTL3; (+) strand; PAM type: NRG; PAM sequence: TAG
  source 1..20: mol_type = other DNA
gcctcagactcctgagtagc

SEQ ID NO: 10070 - DNA, 20 bp, synthetic construct
  misc_feature 1..20: note = Description of Artificial Sequence: Synthetic oligonucleotide
  misc_feature 1..20: note = Target: ANGPTL3; (+) strand; PAM type: NRG; PAM sequence: AGG
  source 1..20: mol_type = other DNA
cctcagactcctgagtagct

SEQ ID NO: 10071 - DNA, 20 bp, synthetic construct
  misc_feature 1..20: note = Description of Artificial Sequence: Synthetic oligonucleotide
  misc_feature 1..20: note = Target: ANGPTL3; (+) strand; PAM type: NRG; PAM sequence: CAG
  source 1..20: mol_type = other DNA
ctcctgagtagctaggatta

SEQ ID NO: 10072 - DNA, 20 bp, synthetic construct
  misc_feature 1..20: note = Description of Artificial Sequence: Synthetic oligonucleotide
  misc_feature 1..20: note = Target: ANGPTL3; (+) strand; PAM type: NRG; PAM sequence: AGG
  source 1..20: mol_type = other DNA
tcctgagtagctaggattac

SEQ ID NO: 10073 - DNA, 20 bp, synthetic construct
  misc_feature 1..20: note = Description of Artificial Sequence: Synthetic oligonucleotide
  misc_feature 1..20: note = Target: ANGPTL3; (+) strand; PAM type: NRG; PAM sequence: TGG
  source 1..20: mol_type = other DNA
caggtatgtgccaccatgcc

SEQ ID NO: 10074 - DNA, 20 bp, synthetic construct
  misc_feature 1..20: note = Description of Artificial Sequence: Synthetic oligonucleotide
  misc_feature 1..20: note = Target: ANGPTL3; (+) strand; PAM type: NRG; PAM sequence: TAG
  source 1..20: mol_type = other DNA
ctggctaatttttgtatttt

SEQ ID NO: 10075 - DNA, 20 bp, synthetic construct
  misc_feature 1..20: note = Description of Artificial Sequence: Synthetic oligonucleotide
  misc_feature 1..20: note = Target: ANGPTL3; (+) strand; PAM type: NRG; PAM sequence: TAG
  source 1..20: mol_type = other DNA
gctaatttttgtatttttag

SEQ ID NO: 10076 - DNA, 20 bp, synthetic construct
  misc_feature 1..20: note = Description of Artificial Sequence: Synthetic oligonucleotide
  misc_feature 1..20: note = Target: ANGPTL3; (+) strand; PAM type: NRG; PAM sequence: GAG
  source 1..20: mol_type = other DNA
taatttttgtatttttagta

SEQ ID NO: 10077 - DNA, 20 bp, synthetic construct
  misc_feature 1..20: note = Description of Artificial Sequence: Synthetic oligonucleotide
  misc_feature 1..20: note = Target: ANGPTL3; (+) strand; PAM type: NRG; PAM sequence: CGG
  source 1..20: mol_type = other DNA
ttttgtatttttagtagaga

SEQ ID NO: 10078 - DNA, 20 bp, synthetic construct
  misc_feature 1..20: note = Description of Artificial Sequence: Synthetic oligonucleotide
  misc_feature 1..20: note = Target: ANGPTL3; (+) strand; PAM type: NRG; PAM sequence: GAG
  source 1..20: mol_type = other DNA
ttgtatttttagtagagacg

SEQ ID NO: 10079 - DNA, 20 bp, synthetic construct
  misc_feature 1..20: note = Description of Artificial Sequence: Synthetic oligonucleotide
  misc_feature 1..20: note = Target: ANGPTL3; (+) strand; PAM type: NRG; PAM sequence: TGG
  source 1..20: mol_type = other DNA
gagacggagtttcatcatgt

SEQ ID NO: 10080 - DNA, 20 bp, synthetic construct
  misc_feature 1..20: note = Description of Artificial Sequence: Synthetic oligonucleotide
  misc_feature 1..20: note = Target: ANGPTL3; (+) strand; PAM type: NRG; PAM sequence: CAG
  source 1..20: mol_type = other DNA
cggagtttcatcatgttggt

SEQ ID NO: 10081 - DNA, 20 bp, synthetic construct
  misc_feature 1..20: note = Description of Artificial Sequence: Synthetic oligonucleotide
  misc_feature 1..20: note = Target: ANGPTL3; (+) strand; PAM type: NRG; PAM sequence: AGG
  source 1..20: mol_type = other DNA
ggagtttcatcatgttggtc

SEQ ID NO: 10082 - DNA, 20 bp, synthetic construct
  misc_feature 1..20: note = Description of Artificial Sequence: Synthetic oligonucleotide
  misc_feature 1..20: note = Target: ANGPTL3; (+) strand; PAM type: NRG; PAM sequence: TGG
  source 1..20: mol_type = other DNA
tttcatcatgttggtcaggc

SEQ ID NO: 10083 - DNA, 20 bp, synthetic construct
  misc_feature 1..20: note = Description of Artificial Sequence: Synthetic oligonucleotide
  misc_feature 1..20: note = Target: ANGPTL3; (+) strand; PAM type: NRG; PAM sequence: CGG
  source 1..20: mol_type = other DNA
acctcgtgatccgccttcct

SEQ ID NO: 10084 - DNA, 20 bp, synthetic construct
  misc_feature 1..20: note = Description of Artificial Sequence: Synthetic oligonucleotide
  misc_feature 1..20: note = Target: ANGPTL3; (+) strand; PAM type: NRG; PAM sequence: AAG
  source 1..20: mol_type = other DNA
ccgccttcctcggcctccca

SEQ ID NO: 10085 - DNA, 20 bp, synthetic construct
  misc_feature 1..20: note = Description of Artificial Sequence: Synthetic oligonucleotide
  misc_feature 1..20: note = Target: ANGPTL3; (+) strand; PAM type: NRG; PAM sequence: AAG
  source 1..20: mol_type = other DNA
cctcggcctcccaaagtgct

SEQ ID NO: 10086 - DNA, 20 bp, synthetic construct
  misc_feature 1..20: note = Description of Artificial Sequence: Synthetic oligonucleotide
  misc_feature 1..20: note = Target: ANGPTL3; (+) strand; PAM type: NRG; PAM sequence: CAG
  source 1..20: mol_type = other DNA
ctcccaaagtgctaagatta

SEQ ID NO: 10087 - DNA, 20 bp, synthetic construct
  misc_feature 1..20: note = Description of Artificial Sequence: Synthetic oligonucleotide
  misc_feature 1..20: note = Target: ANGPTL3; (+) strand; PAM type: NRG; PAM sequence: AGG
  source 1..20: mol_type = other DNA
tcccaaagtgctaagattac

SEQ ID NO: 10088 - DNA, 20 bp, synthetic construct
  misc_feature 1..20: note = Description of Artificial Sequence: Synthetic oligonucleotide
  misc_feature 1..20: note = Target: ANGPTL3; (+) strand; PAM type: NRG; PAM sequence: GAG
  source 1..20: mol_type = other DNA
agtgctaagattacaggcgt

SEQ ID NO: 10089 - DNA, 20 bp, synthetic construct
  misc_feature 1..20: note = Description of Artificial Sequence: Synthetic oligonucleotide
  misc_feature 1..20: note = Target: ANGPTL3; (+) strand; PAM type: NRG; PAM sequence: CAG
  source 1..20: mol_type = other DNA
caggcgtgagcccccgcgcc

SEQ ID NO: 10090 - DNA, 20 bp, synthetic construct
  misc_feature 1..20: note = Description of Artificial Sequence: Synthetic oligonucleotide
  misc_feature 1..20: note = Target: ANGPTL3; (+) strand; PAM type: NRG; PAM sequence: CAG
  source 1..20: mol_type = other DNA
gcccccgcgcccagccgact

SEQ ID NO: 10091 - DNA, 20 bp, synthetic construct
  misc_feature 1..20: note = Description of Artificial Sequence: Synthetic oligonucleotide
  misc_feature 1..20: note = Target: ANGPTL3; (+) strand; PAM type: NRG; PAM sequence: TAG
  source 1..20: mol_type = other DNA
cccagccgactcagttttta

SEQ ID NO: 10092 - DNA, 20 bp, synthetic construct
  misc_feature 1..20: note = Description of Artificial Sequence: Synthetic oligonucleotide
  misc_feature 1..20: note = Target: ANGPTL3; (+) strand; PAM type: NRG; PAM sequence: TAG
  source 1..20: mol_type = other DNA
tttttatagttaaaataaac

SEQ ID NO: 10093 - DNA, 20 bp, synthetic construct
  misc_feature 1..20: note = Description of Artificial Sequence: Synthetic oligonucleotide
  misc_feature 1..20: note = Target: ANGPTL3; (+) strand; PAM type: NRG; PAM sequence: AGG
  source 1..20: mol_type = other DNA
ttttatagttaaaataaact

SEQ ID NO: 10094 - DNA, 20 bp, synthetic construct
  misc_feature 1..20: note = Description of Artificial Sequence: Synthetic oligonucleotide
  misc_feature 1..20: note = Target: ANGPTL3; (+) strand; PAM type: NRG; PAM sequence: TAG
  source 1..20: mol_type = other DNA
ataaactaggaccaattcga

SEQ ID NO: 10095 - DNA, 20 bp, synthetic construct
  misc_feature 1..20: note = Description of Artificial Sequence: Synthetic oligonucleotide
  misc_feature 1..20: note = Target: ANGPTL3; (+) strand; PAM type: NRG; PAM sequence: CAG
  source 1..20: mol_type = other DNA
caattcgatagaataaaact

SEQ ID NO: 10096 - DNA, 20 bp, synthetic construct
  misc_feature 1..20: note = Description of Artificial Sequence: Synthetic oligonucleotide
  misc_feature 1..20: note = Target: ANGPTL3; (+) strand; PAM type: NRG; PAM sequence: GAG
  source 1..20: mol_type = other DNA
attcgatagaataaaactca

SEQ ID NO: 10097 - DNA, 20 bp, synthetic construct
  misc_feature 1..20: note = Description of Artificial Sequence: Synthetic oligonucleotide
  misc_feature 1..20: note = Target: ANGPTL3; (+) strand; PAM type: NRG; PAM sequence: TGG
  source 1..20: mol_type = other DNA
cgatagaataaaactcagag

SEQ ID NO: 10098 - DNA, 20 bp, synthetic construct
  misc_feature 1..20: note = Description of Artificial Sequence: Synthetic oligonucleotide
  misc_feature 1..20: note = Target: ANGPTL3; (+) strand; PAM type: NRG; PAM sequence: AAG
  source 1..20: mol_type = other DNA
aaaactcagagtggtataac

SEQ ID NO: 10099 - DNA, 20 bp, synthetic construct
  misc_feature 1..20: note = Description of Artificial Sequence: Synthetic oligonucleotide
  misc_feature 1..20: note = Target: ANGPTL3; (+) strand; PAM type: NRG; PAM sequence: AGG
  source 1..20: mol_type = other DNA
aaactcagagtggtataaca

SEQ ID NO: 10100 - DNA, 20 bp, synthetic construct
  misc_feature 1..20: note = Description of Artificial Sequence: Synthetic oligonucleotide
  misc_feature 1..20: note = Target: ANGPTL3; (+) strand; PAM type: NRG; PAM sequence: TAG
  source 1..20: mol_type = other DNA
taacaaggacaaaaccaaaa

SEQ ID NO: 10101 - DNA, 20 bp, synthetic construct
  misc_feature 1..20: note = Description of Artificial Sequence: Synthetic oligonucleotide
  misc_feature 1..20: note = Target: ANGPTL3; (+) strand; PAM type: NRG; PAM sequence: CAG
  source 1..20: mol_type = other DNA
caaggacaaaaccaaaatag

SEQ ID NO: 10102 - DNA, 20 bp, synthetic construct
  misc_feature 1..20: note = Description of Artificial Sequence: Synthetic oligonucleotide
  misc_feature 1..20: note = Target: ANGPTL3; (+) strand; PAM type: NRG; PAM sequence: GAG
  source 1..20: mol_type = other DNA
aggacaaaaccaaaatagca

SEQ ID NO: 10103 - DNA, 20 bp, synthetic construct
  misc_feature 1..20: note = Description of Artificial Sequence: Synthetic oligonucleotide
  misc_feature 1..20: note = Target: ANGPTL3; (+) strand; PAM type: NRG; PAM sequence: TGG
  source 1..20: mol_type = other DNA
aaccaaaatagcagagtatg

SEQ ID NO: 10104 - DNA, 20 bp, synthetic construct
  misc_feature 1..20: note = Description of Artificial Sequence: Synthetic oligonucleotide
  misc_feature 1..20: note = Target: ANGPTL3; (+) strand; PAM type: NRG; PAM sequence: CAG
  source 1..20: mol_type = other DNA
caaaatagcagagtatgtgg

SEQ ID NO: 10105 - DNA, 20 bp, synthetic construct
  misc_feature 1..20: note = Description of Artificial Sequence: Synthetic oligonucleotide
  misc_feature 1..20: note = Target: ANGPTL3; (+) strand; PAM type: NRG; PAM sequence: TAG
  source 1..20: mol_type = other DNA
aatagcagagtatgtggcag

SEQ ID NO: 10106 - DNA, 20 bp, synthetic construct
  misc_feature 1..20: note = Description of Artificial Sequence: Synthetic oligonucleotide
  misc_feature 1..20: note = Target: ANGPTL3; (+) strand; PAM type: NRG; PAM sequence: GAG
  source 1..20: mol_type = other DNA
agagtatgtggcagtagctt

SEQ ID NO: 10107 - DNA, 20 bp, synthetic construct
  misc_feature 1..20: note = Description of Artificial Sequence: Synthetic oligonucleotide
  misc_feature 1..20: note = Target: ANGPTL3; (+) strand; PAM type: NRG; PAM sequence: AAG
  source 1..20: mol_type = other DNA
acaaaaaccaatactttctg

SEQ ID NO: 10108 - DNA, 20 bp, synthetic construct
  misc_feature 1..20: note = Description of Artificial Sequence: Synthetic oligonucleotide
  misc_feature 1..20: note = Target: ANGPTL3; (+) strand; PAM type: NRG; PAM sequence: CAG
  source 1..20: mol_type = other DNA
aaaaccaatactttctgaag

SEQ ID NO: 10109 - DNA, 20 bp, synthetic construct
  misc_feature 1..20: note = Description of Artificial Sequence: Synthetic oligonucleotide
  misc_feature 1..20: note = Target: ANGPTL3; (+) strand; PAM type: NRG; PAM sequence: GAG
  source 1..20: mol_type = other DNA
aaccaatactttctgaagca

SEQ ID NO: 10110 - DNA, 20 bp, synthetic construct
  misc_feature 1..20: note = Description of Artificial Sequence: Synthetic oligonucleotide
  misc_feature 1..20: note = Target: ANGPTL3; (+) strand; PAM type: NRG; PAM sequence: TAG
  source 1..20: mol_type = other DNA
cagagaaccatacacttgaa

SEQ ID NO: 10111 - DNA, 20 bp, synthetic construct
  misc_feature 1..20: note = Description of Artificial Sequence: Synthetic oligonucleotide
  misc_feature 1..20: note = Target: ANGPTL3; (+) strand; PAM type: NRG; PAM sequence: CAG
  source 1..20: mol_type = other DNA
aaaaaatgctcctgaatttt

SEQ ID NO: 10112 - DNA, 20 bp, synthetic construct
  misc_feature 1..20: note = Description of Artificial Sequence: Synthetic oligonucleotide
  misc_feature 1..20: note = Target: ANGPTL3; (+) strand; PAM type: NRG; PAM sequence: CAG
  source 1..20: mol_type = other DNA
cctgaattttcagtaacgtt

SEQ ID NO: 10113 - DNA, 20 bp, synthetic construct
  misc_feature 1..20: note = Description of Artificial Sequence: Synthetic oligonucleotide
  misc_feature 1..20: note = Target: ANGPTL3; (+) strand; PAM type: NRG; PAM sequence: TAG
  source 1..20: mol_type = other DNA
acttccttaaattatgaatg

SEQ ID NO: 10114 - DNA, 20 bp, synthetic construct
  misc_feature 1..20: note = Description of Artificial Sequence: Synthetic oligonucleotide
  misc_feature 1..20: note = Target: ANGPTL3; (+) strand; PAM type: NRG; PAM sequence: CAG
  source 1..20: mol_type = other DNA
tgaatgtagtaaaccaacca

SEQ ID NO: 10115 - DNA, 20 bp, synthetic construct
  misc_feature 1..20: note = Description of Artificial Sequence: Synthetic oligonucleotide
  misc_feature 1..20: note = Target: ANGPTL3; (+) strand; PAM type: NRG; PAM sequence: CAG
  source 1..20: mol_type = other DNA
atgtagtaaaccaaccacag

SEQ ID NO: 10116 - DNA, 20 bp, synthetic construct
  misc_feature 1..20: note = Description of Artificial Sequence: Synthetic oligonucleotide
  misc_feature 1..20: note = Target: ANGPTL3; (+) strand; PAM type: NRG; PAM sequence: CAG
  source 1..20: mol_type = other DNA
accaaccacagcagtattac

SEQ ID NO: 10117 - DNA, 20 bp, synthetic construct
  misc_feature 1..20: note = Description of Artificial Sequence: Synthetic oligonucleotide
  misc_feature 1..20: note = Target: ANGPTL3; (+) strand; PAM type: NRG; PAM sequence: AAG
  source 1..20: mol_type = other DNA
cagcagtattaccagtatat

SEQ ID NO: 10118 - DNA, 20 bp, synthetic construct
  misc_feature 1..20: note = Description of Artificial Sequence: Synthetic oligonucleotide
  misc_feature 1..20: note = Target: ANGPTL3; (+) strand; PAM type: NRG; PAM sequence: TAG
  source 1..20: mol_type = other DNA
atataagattttgtcattaa

SEQ ID NO: 10119 - DNA, 20 bp, synthetic construct
  misc_feature 1..20: note = Description of Artificial Sequence: Synthetic oligonucleotide
  misc_feature 1..20: note = Target: ANGPTL3; (+) strand; PAM type: NRG; PAM sequence: AAG
  source 1..20: mol_type = other DNA
tattattattattatacttt

SEQ ID NO: 10120 - DNA, 20 bp, synthetic construct
  misc_feature 1..20: note = Description of Artificial Sequence: Synthetic oligonucleotide
  misc_feature 1..20: note = Target: ANGPTL3; (+) strand; PAM type: NRG; PAM sequence: TGG
  source 1..20: mol_type = other DNA
tattattatactttaagttc

SEQ ID NO: 10121 - DNA, 20 bp, synthetic construct
  misc_feature 1..20: note = Description of Artificial Sequence: Synthetic oligonucleotide
  misc_feature 1..20: note = Target: ANGPTL3; (+) strand; PAM type: NRG; PAM sequence: GGG
  source 1..20: mol_type = other DNA
attattatactttaagttct

SEQ ID NO: 10122 - DNA, 20 bp, synthetic construct
  misc_feature 1..20: note = Description of Artificial Sequence: Synthetic oligonucleotide
  misc_feature 1..20: note = Target: ANGPTL3; (+) strand; PAM type: NRG; PAM sequence: CAG
  source 1..20: mol_type = other DNA
taagttctgggatacatgcg

SEQ ID NO: 10123 - DNA, 20 bp, synthetic construct
  misc_feature 1..20: note = Description of Artificial Sequence: Synthetic oligonucleotide
  misc_feature 1..20: note = Target: ANGPTL3; (+) strand; PAM type: NRG; PAM sequence: CAG
  source 1..20: mol_type = other DNA
ggatacatgcgcagaacgtg

SEQ ID NO: 10124 - DNA, 20 bp, synthetic construct
  misc_feature 1..20: note = Description of Artificial Sequence: Synthetic oligonucleotide
  misc_feature 1..20: note = Target: ANGPTL3; (+) strand; PAM type: NRG; PAM sequence: TAG
  source 1..20: mol_type = other DNA
gaacgtgcagttttgttaca

SEQ ID NO: 10125 - DNA, 20 bp, synthetic construct
  misc_feature 1..20: note = Description of Artificial Sequence: Synthetic oligonucleotide
  misc_feature 1..20: note = Target: ANGPTL3; (+) strand; PAM type: NRG; PAM sequence: AGG
  source 1..20: mol_type = other DNA
aacgtgcagttttgttacat

SEQ ID NO: 10126 - DNA, 20 bp, synthetic construct
  misc_feature 1..20: note = Description of Artificial Sequence: Synthetic oligonucleotide
  misc_feature 1..20: note = Target: ANGPTL3; (+) strand; PAM type: NRG; PAM sequence: TGG
  source 1..20: mol_type = other DNA
ttgttacataggtatacacg

SEQ ID NO: 10127 - DNA, 20 bp, synthetic construct
  misc_feature 1..20: note = Description of Artificial Sequence: Synthetic oligonucleotide
  misc_feature 1..20: note = Target: ANGPTL3; (+) strand; PAM type: NRG; PAM sequence: TGG
  source 1..20: mol_type = other DNA
acataggtatacacgtggta

SEQ ID NO: 10128 - DNA, 20 bp, synthetic construct
  misc_feature 1..20: note = Description of Artificial Sequence: Synthetic oligonucleotide
  misc_feature 1..20: note = Target: ANGPTL3; (+) strand; PAM type: NRG; PAM sequence: TGG
  source 1..20: mol_type = other DNA
taggtatacacgtggtatgg

SEQ ID NO: 10129 - DNA, 20 bp, synthetic construct
  misc_feature 1..20: note = Description of Artificial Sequence: Synthetic oligonucleotide
  misc_feature 1..20: note = Target: ANGPTL3; (+) strand; PAM type: NRG; PAM sequence: TAG
  source 1..20: mol_type = other DNA
catcaacccgtcatctacat

SEQ ID NO: 10130 - DNA, 20 bp, synthetic construct
  misc_feature 1..20: note = Description of Artificial Sequence: Synthetic oligonucleotide
  misc_feature 1..20: note = Target: ANGPTL3; (+) strand; PAM type: NRG; PAM sequence: AGG
  source 1..20: mol_type = other DNA
atcaacccgtcatctacatt

SEQ ID NO: 10131 - DNA, 20 bp, synthetic construct
  misc_feature 1..20: note = Description of Artificial Sequence: Synthetic oligonucleotide
  misc_feature 1..20: note = Target: ANGPTL3; (+) strand; PAM type: NRG; PAM sequence: TAG
  source 1..20: mol_type = other DNA
tcctaatgctatccctcccc

SEQ ID NO: 10132 - DNA, 20 bp, synthetic construct
  misc_feature 1..20: note = Description of Artificial Sequence: Synthetic oligonucleotide
  misc_feature 1..20: note = Target: ANGPTL3; (+) strand; PAM type: NRG; PAM sequence: CAG
  source 1..20: mol_type = other DNA
ctcccctagccccaccccga

SEQ ID NO: 10133 - DNA, 20 bp, synthetic construct
  misc_feature 1..20: note = Description of Artificial Sequence: Synthetic oligonucleotide
  misc_feature 1..20: note = Target: ANGPTL3; (+) strand; PAM type: NRG; PAM sequence: AGG
  source 1..20: mol_type = other DNA
tcccctagccccaccccgac

SEQ ID NO: 10134 - DNA, 20 bp, synthetic construct
  misc_feature 1..20: note = Description of Artificial Sequence: Synthetic oligonucleotide
  misc_feature 1..20: note = Target: ANGPTL3; (+) strand; PAM type: NRG; PAM sequence: CAG
  source 1..20: mol_type = other DNA
agccccaccccgacaggtcc

SEQ ID NO: 10135 - DNA, 20 bp, synthetic construct
  misc_feature 1..20: note = Description of Artificial Sequence: Synthetic oligonucleotide
  misc_feature 1..20: note = Target: ANGPTL3; (+) strand; PAM type: NRG; PAM sequence: TAG
  source 1..20: mol_type = other DNA
gtccatgtgttctcattgtt

SEQ ID NO: 10136 - DNA, 20 bp, synthetic construct
  misc_feature 1..20: note = Description of Artificial Sequence: Synthetic oligonucleotide
  misc_feature 1..20: note = Target: ANGPTL3; (+) strand; PAM type: NRG; PAM sequence: GAG
  source 1..20: mol_type = other DNA
attgtttagctcccacttat

SEQ ID NO: 10137 - DNA, 20 bp, synthetic construct
  misc_feature 1..20: note = Description of Artificial Sequence: Synthetic oligonucleotide
  misc_feature 1..20: note = Target: ANGPTL3; (+) strand; PAM type: NRG; PAM sequence: GAG
  source 1..20: mol_type = other DNA
tttagctcccacttatgagt

SEQ ID NO: 10138 - DNA, 20 bp, synthetic construct
  misc_feature 1..20: note = Description of Artificial Sequence: Synthetic oligonucleotide
  misc_feature 1..20: note = Target: ANGPTL3; (+) strand; PAM type: NRG; PAM sequence: TGG
  source 1..20: mol_type = other DNA
cacttatgagtgagaacatg

SEQ ID NO: 10139 - DNA, 20 bp, synthetic construct
  misc_feature 1..20: note = Description of Artificial Sequence: Synthetic oligonucleotide
  misc_feature 1..20: note = Target: ANGPTL3; (+) strand; PAM type: NRG; PAM sequence: TGG
  source 1..20: mol_type = other DNA
gagtgagaacatgtggtgtt

SEQ ID NO: 10140 - DNA, 20 bp, synthetic construct
  misc_feature 1..20: note = Description of Artificial Sequence: Synthetic oligonucleotide
  misc_feature 1..20: note = Target: ANGPTL3; (+) strand; PAM type: NRG; PAM sequence: TAG
  source 1..20: mol_type = other DNA
ttggttttctgttcctgtgt

SEQ ID NO: 10141 - DNA, 20 bp, synthetic construct
  misc_feature 1..20: note = Description of Artificial Sequence: Synthetic oligonucleotide
  misc_feature 1..20: note = Target: ANGPTL3; (+) strand; PAM type: NRG; PAM sequence: GAG
  source 1..20: mol_type = other DNA
tgttcctgtgttagtttgct

SEQ ID NO: 10142 - DNA, 20 bp, synthetic construct
  misc_feature 1..20: note = Description of Artificial Sequence: Synthetic oligonucleotide
  misc_feature 1..20: note = Target: ANGPTL3; (+) strand; PAM type: NRG; PAM sequence: TGG
  source 1..20: mol_type = other DNA
tgttagtttgctgagaatga

SEQ ID NO: 10143 - DNA, 20 bp, synthetic construct
  misc_feature 1..20: note = Description of Artificial Sequence: Synthetic oligonucleotide
  misc_feature 1..20: note = Target: ANGPTL3; (+) strand; PAM type: NRG; PAM sequence: CAG
  source 1..20: mol_type = other DNA
ttgctgagaatgatggtttc

SEQ ID NO: 10144 - DNA, 20 bp, synthetic construct
  misc_feature 1..20: note = Description of Artificial Sequence: Synthetic oligonucleotide
  misc_feature 1..20: note = Target: ANGPTL3; (+) strand; PAM type: NRG; PAM sequence: AAG
  source 1..20: mol_type = other DNA
gcttcatccatgtccctaca

SEQ ID NO: 10145 - DNA, 20 bp, synthetic construct
  misc_feature 1..20: note = Description of Artificial Sequence: Synthetic oligonucleotide
  misc_feature 1..20: note = Target: ANGPTL3; (+) strand; PAM type: NRG; PAM sequence: AGG
  source 1..20: mol_type = other DNA
cttcatccatgtccctacaa

SEQ ID NO: 10146 - DNA, 20 bp, synthetic construct
  misc_feature 1..20: note = Description of Artificial Sequence: Synthetic oligonucleotide
  misc_feature 1..20: note = Target: ANGPTL3; (+) strand; PAM type: NRG; PAM sequence: TGG
  source 1..20: mol_type = other DNA
catgaactcatcctttttta

SEQ ID NO: 10147 - DNA, 20 bp, synthetic construct
  misc_feature 1..20: note = Description of Artificial Sequence: Synthetic oligonucleotide
  misc_feature 1..20: note = Target: ANGPTL3; (+) strand; PAM type: NRG; PAM sequence: TAG
  source 1..20: mol_type = other DNA
catccttttttatggctgca

SEQ ID NO: 10148 - DNA, 20 bp, synthetic construct
  misc_feature 1..20: note = Description of Artificial Sequence: Synthetic oligonucleotide
  misc_feature 1..20: note = Target: ANGPTL3; (+) strand; PAM type: NRG; PAM sequence: TGG
  source 1..20: mol_type = other DNA
tatggctgcatagtattcca

SEQ ID NO: 10149 - DNA, 20 bp, synthetic construct
  misc_feature 1..20: note = Description of Artificial Sequence: Synthetic oligonucleotide
  misc_feature 1..20: note = Target: ANGPTL3; (+) strand; PAM type: NRG; PAM sequence: CAG
  source 1..20: mol_type = other DNA
tgtgccacattttcttcatc

SEQ ID NO: 10150 - DNA, 20 bp, synthetic construct
  misc_feature 1..20: note = Description of Artificial Sequence: Synthetic oligonucleotide
  misc_feature 1..20: note = Target: ANGPTL3; (+) strand; PAM type: NRG; PAM sequence: TGG
  source 1..20: mol_type = other DNA
ttcatccagtctatcattga

SEQ ID NO: 10151 - DNA, 20 bp, synthetic construct
  misc_feature 1..20: note = Description of Artificial Sequence: Synthetic oligonucleotide
  misc_feature 1..20: note = Target: ANGPTL3; (+) strand; PAM type: NRG; PAM sequence: GGG
  source 1..20: mol_type = other DNA
tcatccagtctatcattgat

SEQ ID NO: 10152 - DNA, 20 bp, synthetic construct
  misc_feature 1..20: note = Description of Artificial Sequence: Synthetic oligonucleotide
  misc_feature 1..20: note = Target: ANGPTL3; (+) strand; PAM type: NRG; PAM sequence: TGG
  source 1..20: mol_type = other DNA
gtctatcattgatgggcatt

SEQ ID NO: 10153 - DNA, 20 bp, synthetic construct
  misc_feature 1..20: note = Description of Artificial Sequence: Synthetic oligonucleotide
  misc_feature 1..20: note = Target: ANGPTL3; (+) strand; PAM type: NRG; PAM sequence: GGG
  source 1..20: mol_type = other DNA
tctatcattgatgggcattt

SEQ ID NO: 10154 - DNA, 20 bp, synthetic construct
  misc_feature 1..20: note = Description of Artificial Sequence: Synthetic oligonucleotide
  misc_feature 1..20: note = Target: ANGPTL3; (+) strand; PAM type: NRG; PAM sequence: TGG
  source 1..20: mol_type = other DNA
tcattgatgggcatttgggt

SEQ ID NO: 10155 - DNA, 20 bp, synthetic construct
  misc_feature 1..20: note = Description of Artificial Sequence: Synthetic oligonucleotide
  misc_feature 1..20: note = Target: ANGPTL3; (+) strand; PAM type: NRG; PAM sequence: AAG
  source 1..20: mol_type = other DNA
tgggcatttgggttggttcc

SEQ ID NO: 10156 - DNA, 20 bp, synthetic construct
  misc_feature 1..20: note = Description of Artificial Sequence: Synthetic oligonucleotide
  misc_feature 1..20: note = Target: ANGPTL3; (+) strand; PAM type: NRG; PAM sequence: TAG
  source 1..20: mol_type = other DNA
caagtctttgttattgtgaa

SEQ ID NO: 10157 - DNA, 20 bp, synthetic construct
  misc_feature 1..20: note = Description of Artificial Sequence: Synthetic oligonucleotide
  misc_feature 1..20: note = Target: ANGPTL3; (+) strand; PAM type: NRG; PAM sequence: TAG
  source 1..20: mol_type = other DNA
catgtgtgcatgtgtcttta

SEQ ID NO: 10158 - DNA, 20 bp, synthetic construct
  misc_feature 1..20: note = Description of Artificial Sequence: Synthetic oligonucleotide
  misc_feature 1..20: note = Target: ANGPTL3; (+) strand; PAM type: NRG; PAM sequence: TAG
  source 1..20: mol_type = other DNA
gtgtgcatgtgtctttatag

SEQ ID NO: 10159 - DNA, 20 bp, synthetic construct
  misc_feature 1..20: note = Description of Artificial Sequence: Synthetic oligonucleotide
  misc_feature 1..20: note = Target: ANGPTL3; (+) strand; PAM type: NRG; PAM sequence: TGG
  source 1..20: mol_type = other DNA
tttgaatatatacccaataa

SEQ ID NO: 10160 - DNA, 20 bp, synthetic construct
  misc_feature 1..20: note = Description of Artificial Sequence: Synthetic oligonucleotide
  misc_feature 1..20: note = Target: ANGPTL3; (+) strand; PAM type: NRG; PAM sequence: GGG
  source 1..20: mol_type = other DNA
ttgaatatatacccaataat

SEQ ID NO: 10161 - DNA, 20 bp, synthetic construct
  misc_feature 1..20: note = Description of Artificial Sequence: Synthetic oligonucleotide
  misc_feature 1..20: note = Target: ANGPTL3; (+) strand; PAM type: NRG; PAM sequence: TGG
  source 1..20: mol_type = other DNA
atacccaataatgggattac

SEQ ID NO: 10162 - DNA, 20 bp, synthetic construct
  misc_feature 1..20: note = Description of Artificial Sequence: Synthetic oligonucleotide
  misc_feature 1..20: note = Target: ANGPTL3; (+) strand; PAM type: NRG; PAM sequence: GGG
  source 1..20: mol_type = other DNA
tacccaataatgggattact

SEQ ID NO: 10163 - DNA, 20 bp, synthetic construct
  misc_feature 1..20: note = Description of Artificial Sequence: Synthetic oligonucleotide
  misc_feature 1..20: note = Target: ANGPTL3; (+) strand; PAM type: NRG; PAM sequence: TGG
  source 1..20: mol_type = other DNA
aatgggattactgggtcaaa

SEQ ID NO: 10164 - DNA, 20 bp, synthetic construct
  misc_feature 1..20: note = Description of Artificial Sequence: Synthetic oligonucleotide
  misc_feature 1..20: note = Target: ANGPTL3; (+) strand; PAM type: NRG; PAM sequence: TAG
  source 1..20: mol_type = other DNA
actgggtcaaatggtatttc

SEQ ID NO: 10165 - DNA, 20 bp, synthetic construct
  misc_feature 1..20: note = Description of Artificial Sequence: Synthetic oligonucleotide
  misc_feature 1..20: note = Target: ANGPTL3; (+) strand; PAM type: NRG; PAM sequence: TAG
  source 1..20: mol_type = other DNA
tcaaatggtatttctagttc

SEQ ID NO: 10166 - DNA, 20 bp, synthetic construct
  misc_feature 1..20: note = Description of Artificial Sequence: Synthetic oligonucleotide
  misc_feature 1..20: note = Target: ANGPTL3; (+) strand; PAM type: NRG; PAM sequence: GAG
  source 1..20: mol_type = other DNA
atttctagttctagttcctt

SEQ ID NO: 10167 - DNA, 20 bp, synthetic construct
  misc_feature 1..20: note = Description of Artificial Sequence: Synthetic oligonucleotide
  misc_feature 1..20: note = Target: ANGPTL3; (+) strand; PAM type: NRG; PAM sequence: AGG
  source 1..20: mol_type = other DNA
tttctagttctagttccttg

SEQ ID NO: 10168 - DNA, 20 bp, synthetic construct
  misc_feature 1..20: note = Description of Artificial Sequence: Synthetic oligonucleotide
  misc_feature 1..20: note = Target: ANGPTL3; (+) strand; PAM type: NRG; PAM sequence: TGG
  source 1..20: mol_type = other DNA
cgccacactgtcttccacaa

SEQ ID NO: 10169 - DNA, 20 bp, synthetic construct
  misc_feature 1..20: note = Description of Artificial Sequence: Synthetic oligonucleotide
  misc_feature 1..20: note = Target: ANGPTL3; (+) strand; PAM type: NRG; PAM sequence: TAG
  source 1..20: mol_type = other DNA
tttttatatcacaactatta

SEQ ID NO: 10170 - DNA, 20 bp, synthetic construct
  misc_feature 1..20: note = Description of Artificial Sequence: Synthetic oligonucleotide
  misc_feature 1..20: note = Target: ANGPTL3; (+) strand; PAM type: NRG; PAM sequence: TAG
  source 1..20: mol_type = other DNA
tgttgatgcttattactatt

SEQ ID NO: 10171 - DNA, 20 bp, synthetic construct
  misc_feature 1..20: note = Description of Artificial Sequence: Synthetic oligonucleotide
  misc_feature 1..20: note = Target: ANGPTL3; (+) strand; PAM type: NRG; PAM sequence: TAG
  source 1..20: mol_type = other DNA
ttactatttagaaaatacaa

SEQ ID NO: 10172 - DNA, 20 bp, synthetic construct
  misc_feature 1..20: note = Description of Artificial Sequence: Synthetic oligonucleotide
  misc_feature 1..20: note = Target: ANGPTL3; (-) strand; PAM type: YTN; PAM sequence: CTC
  source 1..20: mol_type = other DNA
ctgcgtttatggtatcactt

SEQ ID NO: 10173 - DNA, 20 bp, synthetic construct
  misc_feature 1..20: note = Description of Artificial Sequence: Synthetic oligonucleotide
  misc_feature 1..20: note = Target: ANGPTL3; (-) strand; PAM type: YTN; PAM sequence: TTC
  source 1..20: mol_type = other DNA
ctcctgcgtttatggtatca

SEQ ID NO: 10174 - DNA, 20 bp, synthetic construct
  misc_feature 1..20: note = Description of Artificial Sequence: Synthetic oligonucleotide
  misc_feature 1..20: note = Target: ANGPTL3; (-) strand; PAM type: YTN; PAM sequence: CTT
  source 1..20: mol_type = other DNA
cctcctgcgtttatggtatc

SEQ ID NO: 10175 - DNA, 20 bp, synthetic construct
  misc_feature 1..20: note = Description of Artificial Sequence: Synthetic oligonucleotide
  misc_feature 1..20: note = Target: ANGPTL3; (-) strand; PAM type: YTN; PAM sequence: TTC
  source 1..20: mol_type = other DNA
ttcctcctgcgtttatggta

SEQ ID NO: 10176 - DNA, 20 bp, synthetic construct
  misc_feature 1..20: note = Description of Artificial Sequence: Synthetic oligonucleotide
  misc_feature 1..20: note = Target: ANGPTL3; (-) strand; PAM type: YTN; PAM sequence: TTT
  source 1..20: mol_type = other DNA
cttcctcctgcgtttatggt

SEQ ID NO: 10177 - DNA, 20 bp, synthetic construct
  misc_feature 1..20: note = Description of Artificial Sequence: Synthetic oligonucleotide
  misc_feature 1..20: note = Target: ANGPTL3; (-) strand; PAM type: YTN; PAM sequence: TTT
  source 1..20: mol_type = other DNA
tcttcctcctgcgtttatgg

SEQ ID NO: 10178 - DNA, 20 bp, synthetic construct
  misc_feature 1..20: note = Description of Artificial Sequence: Synthetic oligonucleotide
  misc_feature 1..20: note = Target: ANGPTL3; (-) strand; PAM type: YTN; PAM sequence: TTG
  source 1..20: mol_type = other DNA
tcattttcttcctcctgcgt

SEQ ID NO: 10179 - DNA, 20 bp, synthetic construct
  misc_feature 1..20: note = Description of Artificial Sequence: Synthetic oligonucleotide
  misc_feature 1..20: note = Target: ANGPTL3; (-) strand; PAM type: YTN; PAM sequence: TTT
  source 1..20: mol_type = other DNA
gtcattttcttcctcctgcg

SEQ ID NO: 10180 - DNA, 20 bp, synthetic construct
  misc_feature 1..20: note = Description of Artificial Sequence: Synthetic oligonucleotide
  misc_feature 1..20: note = Target: ANGPTL3; (-) strand; PAM type: YTN; PAM sequence: TTC
  source 1..20: mol_type = other DNA
agtttgtcattttcttcctc

SEQ ID NO: 10181 - DNA, 20 bp, synthetic construct
  misc_feature 1..20: note = Description of Artificial Sequence: Synthetic oligonucleotide
  misc_feature 1..20: note = Target: ANGPTL3; (-) strand; PAM type: YTN; PAM sequence: TTT
  source 1..20: mol_type = other DNA
cagtttgtcattttcttcct

SEQ ID NO: 10182 - DNA, 20 bp, synthetic construct
  misc_feature 1..20: note = Description of Artificial Sequence: Synthetic oligonucleotide
  misc_feature 1..20: note = Target: ANGPTL3; (-) strand; PAM type: YTN; PAM sequence: TTT
  source 1..20: mol_type = other DNA
tcagtttgtcattttcttcc

SEQ ID NO: 10183 - DNA, 20 bp, synthetic construct
  misc_feature 1..20: note = Description of Artificial Sequence: Synthetic oligonucleotide
  misc_feature 1..20: note = Target: ANGPTL3; (-) strand; PAM type: YTN; PAM sequence: TTT
  source 1..20: mol_type = other DNA
ttcagtttgtcattttcttc

SEQ ID NO: 10184 - DNA, 20 bp, synthetic construct
  misc_feature 1..20: note = Description of Artificial Sequence: Synthetic oligonucleotide
  misc_feature 1..20: note = Target: ANGPTL3; (-) strand; PAM type: YTN; PAM sequence: TTT
  source 1..20: mol_type = other DNA
tttcagtttgtcattttctt

SEQ ID NO: 10185 - DNA, 20 bp, synthetic construct
  misc_feature 1..20: note = Description of Artificial Sequence: Synthetic oligonucleotide
  misc_feature 1..20: note = Target: ANGPTL3; (-) strand; PAM type: YTN; PAM sequence: TTA
  source 1..20: mol_type = other DNA
tatatataacaaacaataga

SEQ ID NO: 10186 - DNA, 20 bp, synthetic construct
  misc_feature 1..20: note = Description of Artificial Sequence: Synthetic oligonucleotide
  misc_feature 1..20: note = Target: ANGPTL3; (-) strand; PAM type: YTN; PAM sequence: TTG
  source 1..20: mol_type = other DNA
ttatatatataacaaacaat

SEQ ID NO: 10187 - DNA, 20 bp, synthetic construct
  misc_feature 1..20: note = Description of Artificial Sequence: Synthetic oligonucleotide
  misc_feature 1..20: note = Target: ANGPTL3; (-) strand; PAM type: YTN; PAM sequence: TTT
  source 1..20: mol_type = other DNA
gttatatatataacaaacaa

SEQ ID NO: 10188 - DNA, 20 bp, synthetic construct
  misc_feature 1..20: note = Description of Artificial Sequence: Synthetic oligonucleotide
  misc_feature 1..20: note = Target: ANGPTL3; (-) strand; PAM type: YTN; PAM sequence: CTT
  source 1..20: mol_type = other DNA
tgttatatatataacaaaca

SEQ ID NO: 10189 - DNA, 20 bp, synthetic construct
  misc_feature 1..20: note = Description of Artificial Sequence: Synthetic oligonucleotide
  misc_feature 1..20: note = Target: ANGPTL3; (-) strand; PAM type: YTN; PAM sequence: TTC
  source 1..20: mol_type = other DNA
tttgttatatatataacaaa

SEQ ID NO: 10190 - DNA, 20 bp, synthetic construct
  misc_feature 1..20: note = Description of Artificial Sequence: Synthetic oligonucleotide
  misc_feature 1..20: note = Target: ANGPTL3; (-) strand; PAM type: YTN; PAM sequence: CTA
  source 1..20: mol_type = other DNA
attctttgttatatatataa

SEQ ID NO: 10191 - DNA, 20 bp, synthetic construct
  misc_feature 1..20: note = Description of Artificial Sequence: Synthetic oligonucleotide
  misc_feature 1..20: note = Target: ANGPTL3; (-) strand; PAM type: YTN; PAM sequence: TTG
  source 1..20: mol_type = other DNA
tggatactaattctttgtta

SEQ ID NO: 10192 - DNA, 20 bp, synthetic construct
  misc_feature 1..20: note = Description of Artificial Sequence: Synthetic oligonucleotide
  misc_feature 1..20: note = Target: ANGPTL3; (-) strand; PAM type: YTN; PAM sequence: TTA
  source 1..20: mol_type = other DNA
catattgtggatactaattc

SEQ ID NO: 10193 - DNA, 20 bp, synthetic construct
  misc_feature 1..20: note = Description of Artificial Sequence: Synthetic oligonucleotide
  misc_feature 1..20: note = Target: ANGPTL3; (-) strand; PAM type: YTN; PAM sequence: TTT
  source 1..20: mol_type = other DNA
acatattgtggatactaatt

SEQ ID NO: 10194 - DNA, 20 bp, synthetic construct
  misc_feature 1..20: note = Description of Artificial Sequence: Synthetic oligonucleotide
  misc_feature 1..20: note = Target: ANGPTL3; (-) strand; PAM type: YTN; PAM sequence: TTA
  source 1..20: mol_type = other DNA
tttacatattgtggatacta

SEQ ID NO: 10195 - DNA, 20 bp, synthetic construct
  misc_feature 1..20: note = Description of Artificial Sequence: Synthetic oligonucleotide
  misc_feature 1..20: note = Target: ANGPTL3; (-) strand; PAM type: YTN; PAM sequence: TTA
  source 1..20: mol_type = other DNA
ggaattatttacatattgtg

SEQ ID NO: 10196 - DNA, 20 bp, synthetic construct
  misc_feature 1..20: note = Description of Artificial Sequence: Synthetic oligonucleotide
  misc_feature 1..20: note = Target: ANGPTL3; (-) strand; PAM type: YTN; PAM sequence: TTT
  source 1..20: mol_type = other DNA
aggaattatttacatattgt

SEQ ID NO: 10197 - DNA, 20 bp, synthetic construct
  misc_feature 1..20: note = Description of Artificial Sequence: Synthetic oligonucleotide
  misc_feature 1..20: note = Target: ANGPTL3; (-) strand; PAM type: YTN; PAM sequence: TTT
  source 1..20: mol_type = other DNA
taggaattatttacatattg

SEQ ID NO: 10198 - DNA, 20 bp, synthetic construct
  misc_feature 1..20: note = Description of Artificial Sequence: Synthetic oligonucleotide
  misc_feature 1..20: note = Target: ANGPTL3; (-) strand; PAM type: YTN; PAM sequence: CTA
  source 1..20: mol_type = other DNA
attttaggaattatttacat

SEQ ID NO: 10199 - DNA, 20 bp, synthetic construct
  misc_feature 1..20: note = Description of Artificial Sequence: Synthetic oligonucleotide
  misc_feature 1..20: note = Target: ANGPTL3; (-) strand; PAM type: YTN; PAM sequence: CTG
  source 1..20: mol_type = other DNA
actaattttaggaattattt

SEQ ID NO: 10200 - DNA, 20 bp, synthetic construct
  misc_feature 1..20: note = Description of Artificial Sequence: Synthetic oligonucleotide
  misc_feature 1..20: note = Target: ANGPTL3; (-) strand; PAM type: YTN; PAM sequence: TTC
  source 1..20: mol_type = other DNA
tgactaattttaggaattat

SEQ ID NO: 10201 - DNA, 20 bp, synthetic construct
  misc_feature 1..20: note = Description of Artificial Sequence: Synthetic oligonucleotide
  misc_feature 1..20: note = Target: ANGPTL3; (-) strand; PAM type: YTN; PAM sequence: TTT
  source 1..20: mol_type = other DNA
ctgactaattttaggaatta

SEQ ID NO: 10202 - DNA, 20 bp, synthetic construct
  misc_feature 1..20: note = Description of Artificial Sequence: Synthetic oligonucleotide
  misc_feature 1..20: note = Target: ANGPTL3; (-) strand; PAM type: YTN; PAM sequence: CTT
  source 1..20: mol_type = other DNA
tctgactaattttaggaatt

SEQ ID NO: 10203 - DNA, 20 bp, synthetic construct
  misc_feature 1..20: note = Description of Artificial Sequence: Synthetic oligonucleotide
  misc_feature 1..20: note = Target: ANGPTL3; (-) strand; PAM type: YTN; PAM sequence: CTC
  source 1..20: mol_type = other DNA
tttctgactaattttaggaa

SEQ ID NO: 10204 - DNA, 20 bp, synthetic construct
  misc_feature 1..20: note = Description of Artificial Sequence: Synthetic oligonucleotide
  misc_feature 1..20: note = Target: ANGPTL3; (-) strand; PAM type: YTN; PAM sequence: TTG
  source 1..20: mol_type = other DNA
tctctttctgactaatttta

SEQ ID NO: 10205 - DNA, 20 bp, synthetic construct
  misc_feature 1..20: note = Description of Artificial Sequence: Synthetic oligonucleotide
  misc_feature 1..20: note = Target: ANGPTL3; (-) strand; PAM type: YTN; PAM sequence: TTT
  source 1..20: mol_type = other DNA
gtctctttctgactaatttt

SEQ ID NO: 10206 - DNA, 20 bp, synthetic construct
  misc_feature 1..20: note = Description of Artificial Sequence: Synthetic oligonucleotide
  misc_feature 1..20: note = Target: ANGPTL3; (-) strand; PAM type: YTN; PAM sequence: TTA
  source 1..20: mol_type = other DNA
agtttgtctctttctgacta

SEQ ID NO: 10207 - DNA, 20 bp, synthetic construct
  misc_feature 1..20: note = Description of Artificial Sequence: Synthetic oligonucleotide
  misc_feature 1..20: note = Target: ANGPTL3; (-) strand; PAM type: YTN; PAM sequence: TTT
  source 1..20: mol_type = other DNA
aagtttgtctctttctgact

SEQ ID NO: 10208 - DNA, 20 bp, synthetic construct
  misc_feature 1..20: note = Description of Artificial Sequence: Synthetic oligonucleotide
  misc_feature 1..20: note = Target: ANGPTL3; (-) strand; PAM type: YTN; PAM sequence: TTT
  source 1..20: mol_type = other DNA
taagtttgtctctttctgac

SEQ ID NO: 10209 - DNA, 20 bp, synthetic construct
  misc_feature 1..20: note = Description of Artificial Sequence: Synthetic oligonucleotide
  misc_feature 1..20: note = Target: ANGPTL3; (-) strand; PAM type: YTN; PAM sequence: TTT
  source 1..20: mol_type = other DNA
ttaagtttgtctctttctga

SEQ ID NO: 10210 - DNA, 20 bp, synthetic construct
  misc_feature 1..20: note = Description of Artificial Sequence: Synthetic oligonucleotide
  misc_feature 1..20: note = Target: ANGPTL3; (-) strand; PAM type: YTN; PAM sequence: CTT
  source 1..20: mol_type = other DNA
tttaagtttgtctctttctg

SEQ ID NO: 10211 - DNA, 20 bp, synthetic construct
  misc_feature 1..20: note = Description of Artificial Sequence: Synthetic oligonucleotide
  misc_feature 1..20: note = Target: ANGPTL3; (-) strand; PAM type: YTN; PAM sequence: CTC
  source 1..20: mol_type = other DNA
tttttaagtttgtctctttc

SEQ ID NO: 10212 - DNA, 20 bp, synthetic construct
  misc_feature 1..20: note = Description of Artificial Sequence: Synthetic oligonucleotide
  misc_feature 1..20: note = Target: ANGPTL3; (-) strand; PAM type: YTN; PAM sequence: TTA
  source 1..20: mol_type = other DNA
ccctctttttaagtttgtct

SEQ ID NO: 10213 - DNA, 20 bp, synthetic construct
  misc_feature 1..20: note = Description of Artificial Sequence: Synthetic oligonucleotide
  misc_feature 1..20: note = Target: ANGPTL3; (-) strand; PAM type: YTN; PAM sequence: TTG
  source 1..20: mol_type = other DNA
ttaccctctttttaagtttg

SEQ ID NO: 10214 - DNA, 20 bp, synthetic construct
  misc_feature 1..20: note = Description of Artificial Sequence: Synthetic oligonucleotide
  misc_feature 1..20: note = Target: ANGPTL3; (-) strand; PAM type: YTN; PAM sequence: CTT
  source 1..20: mol_type = other DNA
gttaccctctttttaagttt

SEQ ID NO: 10215 - DNA, 20 bp, synthetic construct
  misc_feature 1..20: note = Description of Artificial Sequence: Synthetic oligonucleotide
  misc_feature 1..20: note = Target: ANGPTL3; (-) strand; PAM type: YTN; PAM sequence: CTC
  source 1..20: mol_type = other DNA
cttgttaccctctttttaag

SEQ ID NO: 10216 - DNA, 20 bp, synthetic construct
  misc_feature 1..20: note = Description of Artificial Sequence: Synthetic oligonucleotide
  misc_feature 1..20: note = Target: ANGPTL3; (-) strand; PAM type: YTN; PAM sequence: CTC
  source 1..20: mol_type = other DNA
ccctccttgttaccctcttt

SEQ ID NO: 10217 - DNA, 20 bp, synthetic construct
  misc_feature 1..20: note = Description of Artificial Sequence: Synthetic oligonucleotide
  misc_feature 1..20: note = Target: ANGPTL3; (-) strand; PAM type: YTN; PAM sequence: TTG
  source 1..20: mol_type = other DNA
ctcccctccttgttaccctc

SEQ ID NO: 10218 - DNA, 20 bp, synthetic construct
  misc_feature 1..20: note = Description of Artificial Sequence: Synthetic oligonucleotide
  misc_feature 1..20: note = Target: ANGPTL3; (-) strand; PAM type: YTN; PAM sequence: TTT
  source 1..20: mol_type = other DNA
gctcccctccttgttaccct

SEQ ID NO: 10219 - DNA, 20 bp, synthetic construct
  misc_feature 1..20: note = Description of Artificial Sequence: Synthetic oligonucleotide
  misc_feature 1..20: note = Target: ANGPTL3; (-) strand; PAM type: YTN; PAM sequence: TTA
  source 1..20: mol_type = other DNA
tgtacataatttgctcccct

SEQ ID NO: 10220 - DNA, 20 bp, synthetic construct
  misc_feature 1..20: note = Description of Artificial Sequence: Synthetic oligonucleotide
  misc_feature 1..20: note = Target: ANGPTL3; (-) strand; PAM type: YTN; PAM sequence: CTG
  source 1..20: mol_type = other DNA
gttatgtacataatttgctc

SEQ ID NO: 10221 - DNA, 20 bp, synthetic construct
  misc_feature 1..20: note = Description of Artificial Sequence: Synthetic oligonucleotide
  misc_feature 1..20: note = Target: ANGPTL3; (-) strand; PAM type: YTN; PAM sequence: TTG
  source 1..20: mol_type = other DNA
cgaatcatctggttatgtac

SEQ ID NO: 10222 - DNA, 20 bp, synthetic construct
  misc_feature 1..20: note = Description of Artificial Sequence: Synthetic oligonucleotide
  misc_feature 1..20: note = Target: ANGPTL3; (-) strand; PAM type: YTN; PAM sequence: TTT
  source 1..20: mol_type = other DNA
gcgaatcatctggttatgta

SEQ ID NO: 10223 - DNA, 20 bp, synthetic construct
  misc_feature 1..20: note = Description of Artificial Sequence: Synthetic oligonucleotide
  misc_feature 1..20: note = Target: ANGPTL3; (-) strand; PAM type: YTN; PAM sequence: CTT
  source 1..20: mol_type = other DNA
tgcgaatcatctggttatgt

SEQ ID NO: 10224 - DNA, 20 bp, synthetic construct
  misc_feature 1..20: note = Description of Artificial Sequence: Synthetic oligonucleotide
  misc_feature 1..20: note = Target: ANGPTL3; (-) strand; PAM type: YTN; PAM sequence: TTG
  source 1..20: mol_type = other DNA
ccgtctttgcgaatcatctg

SEQ ID NO: 10225 - DNA, 20 bp, synthetic construct
  misc_feature 1..20: note = Description of Artificial Sequence: Synthetic oligonucleotide
  misc_feature 1..20: note = Target: ANGPTL3; (-) strand; PAM type: YTN; PAM sequence: CTG
  source 1..20: mol_type = other DNA
ttgccgtctttgcgaatcat

SEQ ID NO: 10226 - DNA, 20 bp, synthetic construct
  misc_feature 1..20: note = Description of Artificial Sequence: Synthetic oligonucleotide
  misc_feature 1..20: note = Target: ANGPTL3; (-) strand; PAM type: YTN; PAM sequence: CTC
  source 1..20: mol_type = other DNA
tgttgccgtctttgcgaatc

SEQ ID NO: 10227 - DNA, 20 bp, synthetic construct
  misc_feature 1..20: note = Description of Artificial Sequence: Synthetic oligonucleotide
  misc_feature 1..20: note = Target: ANGPTL3; (-) strand; PAM type: YTN; PAM sequence: CTG
  source 1..20: mol_type = other DNA
gccatctctgttgccgtctt

SEQ ID NO: 10228 - DNA, 20 bp, synthetic construct
  misc_feature 1..20: note = Description of Artificial Sequence: Synthetic oligonucleotide
  misc_feature 1..20: note = Target: ANGPTL3; (-) strand; PAM type: YTN; PAM sequence: TTG
  source 1..20: mol_type = other DNA
ctggccatctctgttgccgt

SEQ ID NO: 10229 - DNA, 20 bp, synthetic construct
  misc_feature 1..20: note = Description of Artificial Sequence: Synthetic oligonucleotide
  misc_feature 1..20: note = Target: ANGPTL3; (-) strand; PAM type: YTN; PAM sequence: TTT
  source 1..20: mol_type = other DNA
gctggccatctctgttgccg

SEQ ID NO: 10230 - DNA, 20 bp, synthetic construct
  misc_feature 1..20: note = Description of Artificial Sequence: Synthetic oligonucleotide
  misc_feature 1..20: note = Target: ANGPTL3; (-) strand; PAM type: YTN; PAM sequence: TTT
  source 1..20: mol_type = other DNA
tgctggccatctctgttgcc

SEQ ID NO: 10231 - DNA, 20 bp, synthetic construct
  misc_feature 1..20: note = Description of Artificial Sequence: Synthetic oligonucleotide
  misc_feature 1..20: note = Target: ANGPTL3; (-) strand; PAM type: YTN; PAM sequence: TTG
  source 1..20: mol_type = other DNA
ttttgctggccatctctgtt

SEQ ID NO: 10232 - DNA, 20 bp, synthetic construct
  misc_feature 1..20: note = Description of Artificial Sequence: Synthetic oligonucleotide
  misc_feature 1..20: note = Target: ANGPTL3; (-) strand; PAM type: YTN; PAM sequence: TTT
  source 1..20: mol_type = other DNA
gttttgctggccatctctgt

SEQ ID NO: 10233 - DNA, 20 bp, synthetic construct
  misc_feature 1..20: note = Description of Artificial Sequence: Synthetic oligonucleotide
  misc_feature 1..20: note = Target: ANGPTL3; (-) strand; PAM type: YTN; PAM sequence: CTA
  source 1..20: mol_type = other DNA
gtttgttttgctggccatct

SEQ ID NO: 10234 - DNA, 20 bp, synthetic construct
  misc_feature 1..20: note = Description of Artificial Sequence: Synthetic oligonucleotide
  misc_feature 1..20: note = Target: ANGPTL3; (-) strand; PAM type: YTN; PAM sequence: CTA
  source 1..20: mol_type = other DNA
atagacaagtatatatctag

SEQ ID NO: 10235 - DNA, 20 bp, synthetic construct
  misc_feature 1..20: note = Description of Artificial Sequence: Synthetic oligonucleotide
  misc_feature 1..20: note = Target: ANGPTL3; (-) strand; PAM type: YTN; PAM sequence: TTG
  source 1..20: mol_type = other DNA
ataaatctaatagacaagta

SEQ ID NO: 10236 - DNA, 20 bp, synthetic construct
  misc_feature 1..20: note = Description of Artificial Sequence: Synthetic oligonucleotide
  misc_feature 1..20: note = Target: ANGPTL3; (-) strand; PAM type: YTN; PAM sequence: TTA
  source 1..20: mol_type = other DNA
atgaaaaaggcaaaaaatgt

SEQ ID NO: 10237 - DNA, 20 bp, synthetic construct
  misc_feature 1..20: note = Description of Artificial Sequence: Synthetic oligonucleotide
  misc_feature 1..20: note = Target: ANGPTL3; (-) strand; PAM type: YTN; PAM sequence: TTT
  source 1..20: mol_type = other DNA
aatgaaaaaggcaaaaaatg

SEQ ID NO: 10238 - DNA, 20 bp, synthetic construct
  misc_feature 1..20: note = Description of Artificial Sequence: Synthetic oligonucleotide
  misc_feature 1..20: note = Target: ANGPTL3; (-) strand; PAM type: YTN; PAM sequence: TTT
  source 1..20: mol_type = other DNA
taatgaaaaaggcaaaaaat

SEQ ID NO: 10239 - DNA, 20 bp, synthetic construct
  misc_feature 1..20: note = Description of Artificial Sequence: Synthetic oligonucleotide
  misc_feature 1..20: note = Target: ANGPTL3; (-) strand; PAM type: YTN; PAM sequence: CTT
  source 1..20: mol_type = other DNA
ttaatgaaaaaggcaaaaaa

SEQ ID NO: 10240 - DNA, 20 bp, synthetic construct
  misc_feature 1..20: note = Description of Artificial Sequence: Synthetic oligonucleotide
  misc_feature 1..20: note = Target: ANGPTL3; (-) strand; PAM type: YTN; PAM sequence: TTA
  source 1..20: mol_type = other DNA
caaatgcttttaatgaaaaa

SEQ ID NO: 10241 - DNA, 20 bp, synthetic construct
  misc_feature 1..20: note = Description of Artificial Sequence: Synthetic oligonucleotide
  misc_feature 1..20: note = Target: ANGPTL3; (-) strand; PAM type: YTN; PAM sequence: TTT
  source 1..20: mol_type = other DNA
acaaatgcttttaatgaaaa

SEQ ID NO: 10242 - DNA, 20 bp, synthetic construct
  misc_feature 1..20: note = Description of Artificial Sequence: Synthetic oligonucleotide
  misc_feature 1..20: note = Target: ANGPTL3; (-) strand; PAM type: YTN; PAM sequence: TTT
  source 1..20: mol_type = other DNA
tacaaatgcttttaatgaaa

SEQ ID NO: 10243 - DNA, 20 bp, synthetic construct
  misc_feature 1..20: note = Description of Artificial Sequence: Synthetic oligonucleotide
  misc_feature 1..20: note = Target: ANGPTL3; (-) strand; PAM type: YTN; PAM sequence: CTT
  source 1..20: mol_type = other DNA
ttacaaatgcttttaatgaa

SEQ ID NO: 10244 - DNA, 20 bp, synthetic construct
  misc_feature 1..20: note = Description of Artificial Sequence: Synthetic oligonucleotide
  misc_feature 1..20: note = Target: ANGPTL3; (-) strand; PAM type: YTN; PAM sequence: CTA
  source 1..20: mol_type = other DNA
tatccttttacaaatgcttt

SEQ ID NO: 10245 - DNA, 20 bp, synthetic construct
  misc_feature 1..20: note = Description of Artificial Sequence: Synthetic oligonucleotide
  misc_feature 1..20: note = Target: ANGPTL3; (-) strand; PAM type: YTN; PAM sequence: TTC
  source 1..20: mol_type = other DNA
ctatatccttttacaaatgc

SEQ ID NO: 10246 - DNA, 20 bp, synthetic construct
  misc_feature 1..20: note = Description of Artificial Sequence: Synthetic oligonucleotide
  misc_feature 1..20: note = Target: ANGPTL3; (-) strand; PAM type: YTN; PAM sequence: TTT
  source 1..20: mol_type = other DNA
cctatatccttttacaaatg

SEQ ID NO: 10247 - DNA, 20 bp, synthetic construct
  misc_feature 1..20: note = Description of Artificial Sequence: Synthetic oligonucleotide
  misc_feature 1..20: note = Target: ANGPTL3; (-) strand; PAM type: YTN; PAM sequence: TTT
  source 1..20: mol_type = other DNA
tcctatatccttttacaaat

SEQ ID NO: 10248 - DNA, 20 bp, synthetic construct
  misc_feature 1..20: note = Description of Artificial Sequence: Synthetic oligonucleotide
  misc_feature 1..20: note = Target: ANGPTL3; (-) strand; PAM type: YTN; PAM sequence: CTT
  source 1..20: mol_type = other DNA
ttcctatatccttttacaaa

SEQ ID NO: 10249 - DNA, 20 bp, synthetic construct
  misc_feature 1..20: note = Description of Artificial Sequence: Synthetic oligonucleotide
  misc_feature 1..20: note = Target: ANGPTL3; (-) strand; PAM type: YTN; PAM sequence: CTC
  source 1..20: mol_type = other DNA
ttttcctatatccttttaca

SEQ ID NO: 10250 - DNA, 20 bp, synthetic construct
  misc_feature 1..20: note = Description of Artificial Sequence: Synthetic oligonucleotide
  misc_feature 1..20: note = Target: ANGPTL3; (-) strand; PAM type: YTN; PAM sequence: TTC
  source 1..20: mol_type = other DNA
ctcttttcctatatcctttt

SEQ ID NO: 10251 - DNA, 20 bp, synthetic construct
  misc_feature 1..20: note = Description of Artificial Sequence: Synthetic oligonucleotide
  misc_feature 1..20: note = Target: ANGPTL3; (-) strand; PAM type: YTN; PAM sequence: CTG
  source 1..20: mol_type = other DNA
ccaggagtatatgagagttc

SEQ ID NO: 10252 - DNA, 20 bp, synthetic construct
  misc_feature 1..20: note = Description of Artificial Sequence: Synthetic oligonucleotide
  misc_feature 1..20: note = Target: ANGPTL3; (-) strand; PAM type: YTN; PAM sequence: TTA
  source 1..20: mol_type = other DNA
catccctgccaggagtatat

SEQ ID NO: 10253 - DNA, 20 bp, synthetic construct
  misc_feature 1..20: note = Description of Artificial Sequence: Synthetic oligonucleotide
  misc_feature 1..20: note = Target: ANGPTL3; (-) strand; PAM type: YTN; PAM sequence: TTT
  source 1..20: mol_type = other DNA
acatccctgccaggagtata

SEQ ID NO: 10254 - DNA, 20 bp, synthetic construct
  misc_feature 1..20: note = Description of Artificial Sequence: Synthetic oligonucleotide
  misc_feature 1..20: note = Target: ANGPTL3; (-) strand; PAM type: YTN; PAM sequence: TTG
  source 1..20: mol_type = other DNA
taccaatttacatccctgcc

SEQ ID NO: 10255 - DNA, 20 bp, synthetic construct
  misc_feature 1..20: note = Description of Artificial Sequence: Synthetic oligonucleotide
  misc_feature 1..20: note = Target: ANGPTL3; (-) strand; PAM type: YTN; PAM sequence: TTC
  source 1..20: mol_type = other DNA
aaaagggttgtaccaattta

SEQ ID NO: 10256 - DNA, 20 bp, synthetic construct
  misc_feature 1..20: note = Description of Artificial Sequence: Synthetic oligonucleotide
  misc_feature 1..20: note = Target: ANGPTL3; (-) strand; PAM type: YTN; PAM sequence: CTT
  source 1..20: mol_type = other DNA
caaaagggttgtaccaattt

SEQ ID NO: 10257 - DNA, 20 bp, synthetic construct
  misc_feature 1..20: note = Description of Artificial Sequence: Synthetic oligonucleotide
  misc_feature 1..20: note = Target: ANGPTL3; (-) strand; PAM type: YTN; PAM sequence: TTG
  source 1..20: mol_type = other DNA
tccttcaaaagggttgtacc

SEQ ID NO: 10258 - DNA, 20 bp, synthetic construct
  misc_feature 1..20: note = Description of Artificial Sequence: Synthetic oligonucleotide
  misc_feature 1..20: note = Target: ANGPTL3; (-) strand; PAM type: YTN; PAM sequence: TTG
  source 1..20: mol_type = other DNA
tcagattgtccttcaaaagg

SEQ ID NO: 10259 - DNA, 20 bp, synthetic construct
  misc_feature 1..20: note = Description of Artificial Sequence: Synthetic oligonucleotide
  misc_feature 1..20: note = Target: ANGPTL3; (-) strand; PAM type: YTN; PAM sequence: TTT
  source 1..20: mol_type = other DNA
gtcagattgtccttcaaaag

SEQ ID NO: 10260 - DNA, 20 bp, synthetic construct
  misc_feature 1..20: note = Description of Artificial Sequence: Synthetic oligonucleotide
  misc_feature 1..20: note = Target: ANGPTL3; (-) strand; PAM type: YTN; PAM sequence: TTT
  source 1..20: mol_type = other DNA
tgtcagattgtccttcaaaa

SEQ ID NO: 10261 - DNA, 20 bp, synthetic construct
  misc_feature 1..20: note = Description of Artificial Sequence: Synthetic oligonucleotide
  misc_feature 1..20: note = Target: ANGPTL3; (-) strand; PAM type: YTN; PAM sequence: CTT
  source 1..20: mol_type = other DNA
ttgtcagattgtccttcaaa

SEQ ID NO: 10262 - DNA, 20 bp, synthetic construct
  misc_feature 1..20: note = Description of Artificial Sequence: Synthetic oligonucleotide
  misc_feature 1..20: note = Target: ANGPTL3; (-) strand; PAM type: YTN; PAM sequence: TTG
  source 1..20: mol_type = other DNA
cttttgtcagattgtccttc

SEQ ID NO: 10263 - DNA, 20 bp, synthetic construct
  misc_feature 1..20: note = Description of Artificial Sequence: Synthetic oligonucleotide
  misc_feature 1..20: note = Target: ANGPTL3; (-) strand; PAM type: YTN; PAM sequence: TTA
  source 1..20: mol_type = other DNA
cgattgcttttgtcagattg

SEQ ID NO: 10264 - DNA, 20 bp, synthetic construct
  misc_feature 1..20: note = Description of Artificial Sequence: Synthetic oligonucleotide
  misc_feature 1..20: note = Target: ANGPTL3; (-) strand; PAM type: YTN; PAM sequence: CTT
  source 1..20: mol_type = other DNA
acgattgcttttgtcagatt

SEQ ID NO: 10265 - DNA, 20 bp, synthetic construct
  misc_feature 1..20: note = Description of Artificial Sequence: Synthetic oligonucleotide
  misc_feature 1..20: note = Target: ANGPTL3; (-) strand; PAM type: YTN; PAM sequence: TTG
  source 1..20: mol_type = other DNA
taacttacgattgcttttgt

SEQ ID NO: 10266 - DNA, 20 bp, synthetic construct
  misc_feature 1..20: note = Description of Artificial Sequence: Synthetic oligonucleotide
  misc_feature 1..20: note = Target: ANGPTL3; (-) strand; PAM type: YTN; PAM sequence: CTT
  source 1..20: mol_type = other DNA
gtaacttacgattgcttttg

SEQ ID NO: 10267 - DNA, 20 bp, synthetic construct
  misc_feature 1..20: note = Description of Artificial Sequence: Synthetic oligonucleotide
  misc_feature 1..20: note = Target: ANGPTL3; (-) strand; PAM type: YTN; PAM sequence: TTG
  source 1..20: mol_type = other DNA
acttgtaacttacgattgct

SEQ ID NO: 10268 - DNA, 20 bp, synthetic construct
  misc_feature 1..20: note = Description of Artificial Sequence: Synthetic oligonucleotide
  misc_feature 1..20: note = Target: ANGPTL3; (-) strand; PAM type: YTN; PAM sequence: TTC
  source 1..20: mol_type = other DNA
atagatgttgacttgtaact

SEQ ID NO: 10269 - DNA, 20 bp, synthetic construct
  misc_feature 1..20: note = Description of Artificial Sequence: Synthetic oligonucleotide
  misc_feature 1..20: note = Target: ANGPTL3; (-) strand; PAM type: YTN; PAM sequence: TTC
  source 1..20: mol_type = other DNA
atatacattcatagatgttg

SEQ ID NO: 10270 - DNA, 20 bp, synthetic construct
  misc_feature 1..20: note = Description of Artificial Sequence: Synthetic oligonucleotide
  misc_feature 1..20: note = Target: ANGPTL3; (-) strand; PAM type: YTN; PAM sequence: TTT
  source 1..20: mol_type = other DNA
catatacattcatagatgtt

SEQ ID NO: 10271 - DNA, 20 bp, synthetic construct
  misc_feature 1..20: note = Description of Artificial Sequence: Synthetic oligonucleotide
  misc_feature 1..20: note = Target: ANGPTL3; (-) strand; PAM type: YTN; PAM sequence: TTT
  source 1..20: mol_type = other DNA
tcatatacattcatagatgt

SEQ ID NO: 10272 - DNA, 20 bp, synthetic construct
  misc_feature 1..20: note = Description of Artificial Sequence: Synthetic oligonucleotide
  misc_feature 1..20: note = Target: ANGPTL3; (-) strand; PAM type: YTN; PAM sequence: TTA
  source 1..20: mol_type = other DNA
tggtggtgatgtatgtatat

SEQ ID NO: 10273 - DNA, 20 bp, synthetic construct
  misc_feature 1..20: note = Description of Artificial Sequence: Synthetic oligonucleotide
  misc_feature 1..20: note = Target: ANGPTL3; (-) strand; PAM type: YTN; PAM sequence: TTT
  source 1..20: mol_type = other DNA
atggtggtgatgtatgtata

SEQ ID NO: 10274 - DNA, 20 bp, synthetic construct
  misc_feature 1..20: note = Description of Artificial Sequence: Synthetic oligonucleotide
  misc_feature 1..20: note = Target: ANGPTL3; (-) strand; PAM type: YTN; PAM sequence: TTT
  source 1..20: mol_type = other DNA
tatggtggtgatgtatgtat

SEQ ID NO: 10275 - DNA, 20 bp, synthetic construct
  misc_feature 1..20: note = Description of Artificial Sequence: Synthetic oligonucleotide
  misc_feature 1..20: note = Target: ANGPTL3; (-) strand; PAM type: YTN; PAM sequence: CTT
  source 1..20: mol_type = other DNA
ttatggtggtgatgtatgta

SEQ ID NO: 10276 - DNA, 20 bp, synthetic construct
  misc_feature 1..20: note = Description of Artificial Sequence: Synthetic oligonucleotide
  misc_feature 1..20: note = Target: ANGPTL3; (-) strand; PAM type: YTN; PAM sequence: TTA
  source 1..20: mol_type = other DNA
taaacagtatgtatagaaaa

SEQ ID NO: 10277 - DNA, 20 bp, synthetic construct
  misc_feature 1..20: note = Description of Artificial Sequence: Synthetic oligonucleotide
  misc_feature 1..20: note = Target: ANGPTL3; (-) strand; PAM type: YTN; PAM sequence: CTA
  source 1..20: mol_type = other DNA
attataaacagtatgtatag

SEQ ID NO: 10278 - DNA, 20 bp, synthetic construct
  misc_feature 1..20: note = Description of Artificial Sequence: Synthetic oligonucleotide
  misc_feature 1..20: note = Target: ANGPTL3; (-) strand; PAM type: YTN; PAM sequence: TTC
  source 1..20: mol_type = other DNA
taattataaacagtatgtat

SEQ ID NO: 10279 - DNA, 20 bp, synthetic construct
  misc_feature 1..20: note = Description of Artificial Sequence: Synthetic oligonucleotide
  misc_feature 1..20: note = Target: ANGPTL3; (-) strand; PAM type: YTN; PAM sequence: TTT
  source 1..20: mol_type = other DNA
ctaattataaacagtatgta

SEQ ID NO: 10280 - DNA, 20 bp, synthetic construct
  misc_feature 1..20: note = Description of Artificial Sequence: Synthetic oligonucleotide
  misc_feature 1..20: note = Target: ANGPTL3; (-) strand; PAM type: YTN; PAM sequence: TTT
  source 1..20: mol_type = other DNA
tctaattataaacagtatgt

SEQ ID NO: 10281 - DNA, 20 bp, synthetic construct
  misc_feature 1..20: note = Description of Artificial Sequence: Synthetic oligonucleotide
  misc_feature 1..20: note = Target: ANGPTL3; (-) strand; PAM type: YTN; PAM sequence: TTC
  source 1..20: mol_type = other DNA
caattttctaattataaaca

SEQ ID NO: 10282 - DNA, 20 bp, synthetic construct
  misc_feature 1..20: note = Description of Artificial Sequence: Synthetic oligonucleotide
  misc_feature 1..20: note = Target: ANGPTL3; (-) strand; PAM type: YTN; PAM sequence: TTT
  source 1..20: mol_type = other DNA
ccaattttctaattataaac

SEQ ID NO: 10283 - DNA, 20 bp, synthetic construct
  misc_feature 1..20: note = Description of Artificial Sequence: Synthetic oligonucleotide
  misc_feature 1..20: note = Target: ANGPTL3; (-) strand; PAM type: YTN; PAM sequence: TTG
  source 1..20: mol_type = other DNA
tttccaattttctaattata

SEQ ID NO: 10284 - DNA, 20 bp, synthetic construct
  misc_feature 1..20: note = Description of Artificial Sequence: Synthetic oligonucleotide
  misc_feature 1..20: note = Target: ANGPTL3; (-) strand; PAM type: YTN; PAM sequence: TTT
  source 1..20: mol_type = other DNA
gtttccaattttctaattat

SEQ ID NO: 10285 - DNA, 20 bp, synthetic construct
  misc_feature 1..20: note = Description of Artificial Sequence: Synthetic oligonucleotide
  misc_feature 1..20: note = Target: ANGPTL3; (-) strand; PAM type: YTN; PAM sequence: TTA
  source 1..20: mol_type = other DNA
atcatttgtttccaattttc

SEQ ID NO: 10286 - DNA, 20 bp, synthetic construct
  misc_feature 1..20: note = Description of Artificial Sequence: Synthetic oligonucleotide
  misc_feature 1..20: note = Target: ANGPTL3; (-) strand; PAM type: YTN; PAM sequence: TTT
  source 1..20: mol_type = other DNA
aatcatttgtttccaatttt

SEQ ID NO: 10287 - DNA, 20 bp, synthetic construct
  misc_feature 1..20: note = Description of Artificial Sequence: Synthetic oligonucleotide
  misc_feature 1..20: note = Target: ANGPTL3; (-) strand; PAM type: YTN; PAM sequence: TTT
  source 1..20: mol_type = other DNA
taatcatttgtttccaattt

SEQ ID NO: 10288 - DNA, 20 bp, synthetic construct
  misc_feature 1..20: note = Description of Artificial Sequence: Synthetic oligonucleotide
  misc_feature 1..20: note = Target: ANGPTL3; (-) strand; PAM type: YTN; PAM sequence: CTT
  source 1..20: mol_type = other DNA
ttaatcatttgtttccaatt

SEQ ID NO: 10289 - DNA, 20 bp, synthetic construct
  misc_feature 1..20: note = Description of Artificial Sequence: Synthetic oligonucleotide
  misc_feature 1..20: note = Target: ANGPTL3; (-) strand; PAM type: YTN; PAM sequence: TTA
  source 1..20: mol_type = other DNA
atcagcccccttttaatcat

SEQ ID NO: 10290 - DNA, 20 bp, synthetic construct
  misc_feature 1..20: note = Description of Artificial Sequence: Synthetic oligonucleotide
  misc_feature 1..20: note = Target: ANGPTL3; (-) strand; PAM type: YTN; PAM sequence: TTT
  source 1..20: mol_type = other DNA
aatcagcccccttttaatca

SEQ ID NO: 10291 - DNA, 20 bp, synthetic construct
  misc_feature 1..20: note = Description of Artificial Sequence: Synthetic oligonucleotide
  misc_feature 1..20: note = Target: ANGPTL3; (-) strand; PAM type: YTN; PAM sequence: TTA
  source 1..20: mol_type = other DNA
atttaatcagccccctttta

SEQ ID NO: 10292 - DNA, 20 bp, synthetic construct
  misc_feature 1..20: note = Description of Artificial Sequence: Synthetic oligonucleotide
  misc_feature 1..20: note = Target: ANGPTL3; (-) strand; PAM type: YTN; PAM sequence: CTT
  source 1..20: mol_type = other DNA
aatttaatcagccccctttt

SEQ ID NO: 10293 - DNA, 20 bp, synthetic construct
  misc_feature 1..20: note = Description of Artificial Sequence: Synthetic oligonucleotide
  misc_feature 1..20: note = Target: ANGPTL3; (-) strand; PAM type: YTN; PAM sequence: TTA
  source 1..20: mol_type = other DNA
tatagatgaaccttaattta

SEQ ID NO: 10294 - DNA, 20 bp, synthetic construct
  misc_feature 1..20: note = Description of Artificial Sequence: Synthetic oligonucleotide
  misc_feature 1..20: note = Target: ANGPTL3; (-) strand; PAM type: YTN; PAM sequence: CTG
  source 1..20: mol_type = other DNA
ttatatagatgaaccttaat

SEQ ID NO: 10295 - DNA, 20 bp, synthetic construct
  misc_feature 1..20: note = Description of Artificial Sequence: Synthetic oligonucleotide
  misc_feature 1..20: note = Target: ANGPTL3; (-) strand; PAM type: YTN; PAM sequence: CTG
  source 1..20: mol_type = other DNA
cataatcctgttatatagat

SEQ ID NO: 10296 - DNA, 20 bp, synthetic construct
  misc_feature 1..20: note = Description of Artificial Sequence: Synthetic oligonucleotide
  misc_feature 1..20: note = Target: ANGPTL3; (-) strand; PAM type: YTN; PAM sequence: TTA
  source 1..20: mol_type = other DNA
atagctgcataatcctgtta

SEQ ID NO: 10297 - DNA, 20 bp, synthetic construct
  misc_feature 1..20: note = Description of Artificial Sequence: Synthetic oligonucleotide
  misc_feature 1..20: note = Target: ANGPTL3; (-) strand; PAM type: YTN; PAM sequence: TTT
  source 1..20: mol_type = other DNA
aatagctgcataatcctgtt

SEQ ID NO: 10298 - DNA, 20 bp, synthetic construct
  misc_feature 1..20: note = Description of Artificial Sequence: Synthetic oligonucleotide
  misc_feature 1..20: note = Target: ANGPTL3; (-) strand; PAM type: YTN; PAM sequence: TTT
  source 1..20: mol_type = other DNA
taatagctgcataatcctgt

SEQ ID NO: 10299 - DNA, 20 bp, synthetic construct
  misc_feature 1..20: note = Description of Artificial Sequence: Synthetic oligonucleotide
  misc_feature 1..20: note = Target: ANGPTL3; (-) strand; PAM type: YTN; PAM sequence: TTT
  source 1..20: mol_type = other DNA
ttaatagctgcataatcctg

SEQ ID NO: 10300 - DNA, 20 bp, synthetic construct
  misc_feature 1..20: note = Description of Artificial Sequence: Synthetic oligonucleotide
  misc_feature 1..20: note = Target: ANGPTL3; (-) strand; PAM type: YTN; PAM sequence: CTT
  source 1..20: mol_type = other DNA
tttaatagctgcataatcct

SEQ ID NO: 10301 - DNA, 20 bp, synthetic construct
  misc_feature 1..20: note = Description of Artificial Sequence: Synthetic oligonucleotide
  misc_feature 1..20: note = Target: ANGPTL3; (-) strand; PAM type: YTN; PAM sequence: TTA
  source 1..20: mol_type = other DNA
ccacgtcctttttaatagct

SEQ ID NO: 10302 - DNA, 20 bp, synthetic construct
  misc_feature 1..20: note = Description of Artificial Sequence: Synthetic oligonucleotide
  misc_feature 1..20: note = Target: ANGPTL3; (-) strand; PAM type: YTN; PAM sequence: CTA
  source 1..20: mol_type = other DNA
tagagttaccacgtcctttt

SEQ ID NO: 10303 - DNA, 20 bp, synthetic construct
  misc_feature 1..20: note = Description of Artificial Sequence: Synthetic oligonucleotide
  misc_feature 1..20: note = Target: ANGPTL3; (-) strand; PAM type: YTN; PAM sequence: CTA
  source 1..20: mol_type = other DNA
tgaatgtctatagagttacc

SEQ ID NO: 10304 - DNA, 20 bp, synthetic construct
  misc_feature 1..20: note = Description of Artificial Sequence: Synthetic oligonucleotide
  misc_feature 1..20: note = Target: ANGPTL3; (-) strand; PAM type: YTN; PAM sequence: TTC
  source 1..20: mol_type = other DNA
ctatgaatgtctatagagtt

SEQ ID NO: 10305 - DNA, 20 bp, synthetic construct
  misc_feature 1..20: note = Description of Artificial Sequence: Synthetic oligonucleotide
  misc_feature 1..20: note = Target: ANGPTL3; (-) strand; PAM type: YTN; PAM sequence: TTT
  source 1..20: mol_type = other DNA
cctatgaatgtctatagagt

SEQ ID NO: 10306 - DNA, 20 bp, synthetic construct
  misc_feature 1..20: note = Description of Artificial Sequence: Synthetic oligonucleotide
  misc_feature 1..20: note = Target: ANGPTL3; (-) strand; PAM type: YTN; PAM sequence: TTT
  source 1..20: mol_type = other DNA
tcctatgaatgtctatagag

SEQ ID NO: 10307 - DNA, 20 bp, synthetic construct
  misc_feature 1..20: note = Description of Artificial Sequence: Synthetic oligonucleotide
  misc_feature 1..20: note = Target: ANGPTL3; (-) strand; PAM type: YTN; PAM sequence: TTA
  source 1..20: mol_type = other DNA
ttttcctatgaatgtctata

SEQ ID NO: 10308 - DNA, 20 bp, synthetic construct
  misc_feature 1..20: note = Description of Artificial Sequence: Synthetic oligonucleotide
  misc_feature 1..20: note = Target: ANGPTL3; (-) strand; PAM type: YTN; PAM sequence: TTT
  source 1..20: mol_type = other DNA
attttcctatgaatgtctat

SEQ ID NO: 10309 - DNA, 20 bp, synthetic construct
  misc_feature 1..20: note = Description of Artificial Sequence: Synthetic oligonucleotide
  misc_feature 1..20: note = Target: ANGPTL3; (-) strand; PAM type: YTN; PAM sequence: TTA
  source 1..20: mol_type = other DNA
aaatttattttcctatgaat

SEQ ID NO: 10310 - DNA, 20 bp, synthetic construct
  misc_feature 1..20: note = Description of Artificial Sequence: Synthetic oligonucleotide
  misc_feature 1..20: note = Target: ANGPTL3; (-) strand; PAM type: YTN; PAM sequence: TTT
  source 1..20: mol_type = other DNA
aaaatttattttcctatgaa

SEQ ID NO: 10311 - DNA, 20 bp, synthetic construct
  misc_feature 1..20: note = Description of Artificial Sequence: Synthetic oligonucleotide
  misc_feature 1..20: note = Target: ANGPTL3; (-) strand; PAM type: YTN; PAM sequence: TTT
  source 1..20: mol_type = other DNA
taaaatttattttcctatga

SEQ ID NO: 10312 - DNA, 20 bp, synthetic construct
  misc_feature 1..20: note = Description of Artificial Sequence: Synthetic oligonucleotide
  misc_feature 1..20: note = Target: ANGPTL3; (-) strand; PAM type: YTN; PAM sequence: TTA
  source 1..20: mol_type = other DNA
gtattttaaaatttattttc

SEQ ID NO: 10313 - DNA, 20 bp, synthetic construct
  misc_feature 1..20: note = Description of Artificial Sequence: Synthetic oligonucleotide
  misc_feature 1..20: note = Target: ANGPTL3; (-) strand; PAM type: YTN; PAM sequence: CTT
  source 1..20: mol_type = other DNA
agtattttaaaatttatttt

SEQ ID NO: 10314 - DNA, 20 bp, synthetic construct
  misc_feature 1..20: note = Description of Artificial Sequence: Synthetic oligonucleotide
  misc_feature 1..20: note = Target: ANGPTL3; (-) strand; PAM type: YTN; PAM sequence: TTC
  source 1..20: mol_type = other DNA
aggatcttagtattttaaaa

SEQ ID NO: 10315 - DNA, 20 bp, synthetic construct
  misc_feature 1..20: note = Description of Artificial Sequence: Synthetic oligonucleotide
  misc_feature 1..20: note = Target: ANGPTL3; (-) strand; PAM type: YTN; PAM sequence: CTC
  source 1..20: mol_type = other DNA
atgatatatatatcattcag

SEQ ID NO: 10316 - DNA, 20 bp, synthetic construct
  misc_feature 1..20: note = Description of Artificial Sequence: Synthetic oligonucleotide
  misc_feature 1..20: note = Target: ANGPTL3; (-) strand; PAM type: YTN; PAM sequence: TTA
  source 1..20: mol_type = other DNA
tgtataatagctcatgatat

SEQ ID NO: 10317 - DNA, 20 bp, synthetic construct
  misc_feature 1..20: note = Description of Artificial Sequence: Synthetic oligonucleotide
  misc_feature 1..20: note = Target: ANGPTL3; (-) strand; PAM type: YTN; PAM sequence: TTG
  source 1..20: mol_type = other DNA
ttatgtataatagctcatga

SEQ ID NO: 10318 - DNA, 20 bp, synthetic construct
  misc_feature 1..20: note = Description of Artificial Sequence: Synthetic oligonucleotide
  misc_feature 1..20: note = Target: ANGPTL3; (-) strand; PAM type: YTN; PAM sequence: CTT
  source 1..20: mol_type = other DNA
gttatgtataatagctcatg

SEQ ID NO: 10319 - DNA, 20 bp, synthetic construct
  misc_feature 1..20: note = Description of Artificial Sequence: Synthetic oligonucleotide
  misc_feature 1..20: note = Target: ANGPTL3; (-) strand; PAM type: YTN; PAM sequence: TTA
  source 1..20: mol_type = other DNA
taacacaagtgggatcttgt

SEQ ID NO: 10320 - DNA, 20 bp, synthetic construct
  misc_feature 1..20: note = Description of Artificial Sequence: Synthetic oligonucleotide
  misc_feature 1..20: note = Target: ANGPTL3; (-) strand; PAM type: YTN; PAM sequence: TTT
  source 1..20: mol_type = other DNA
ataacacaagtgggatcttg

SEQ ID NO: 10321 - DNA, 20 bp, synthetic construct
  misc_feature 1..20: note = Description of Artificial Sequence: Synthetic oligonucleotide
  misc_feature 1..20: note = Target: ANGPTL3; (-) strand; PAM type: YTN; PAM sequence: TTT
  source 1..20: mol_type = other DNA
tataacacaagtgggatctt

SEQ ID NO: 10322 - DNA, 20 bp, synthetic construct
  misc_feature 1..20: note = Description of Artificial Sequence: Synthetic oligonucleotide
  misc_feature 1..20: note = Target: ANGPTL3; (-) strand; PAM type: YTN; PAM sequence: TTT
  source 1..20: mol_type = other DNA
ttataacacaagtgggatct

SEQ ID NO: 10323 - DNA, 20 bp, synthetic construct
  misc_feature 1..20: note = Description of Artificial Sequence: Synthetic oligonucleotide
  misc_feature 1..20: note = Target: ANGPTL3; (-) strand; PAM type: YTN; PAM sequence: TTT
  source 1..20: mol_type = other DNA
tttataacacaagtgggatc

SEQ ID NO: 10324 - DNA, 20 bp, synthetic construct
  misc_feature 1..20: note = Description of Artificial Sequence: Synthetic oligonucleotide
  misc_feature 1..20: note = Target: ANGPTL3; (-) strand; PAM type: YTN; PAM sequence: CTA
  source 1..20: mol_type = other DNA
aacataattttttataacac

SEQ ID NO: 10325 - DNA, 20 bp, synthetic construct
  misc_feature 1..20: note = Description of Artificial Sequence: Synthetic oligonucleotide
  misc_feature 1..20: note = Target: ANGPTL3; (-) strand; PAM type: YTN; PAM sequence: TTG
  source 1..20: mol_type = other DNA
aatgactaaacataattttt

SEQ ID NO: 10326 - DNA, 20 bp, synthetic construct
  misc_feature 1..20: note = Description of Artificial Sequence: Synthetic oligonucleotide
  misc_feature 1..20: note = Target: ANGPTL3; (-) strand; PAM type: YTN; PAM sequence: TTT
  source 1..20: mol_type = other DNA
gaatgactaaacataatttt

SEQ ID NO: 10327 - DNA, 20 bp, synthetic construct
  misc_feature 1..20: note = Description of Artificial Sequence: Synthetic oligonucleotide
  misc_feature 1..20: note = Target: ANGPTL3; (-) strand; PAM type: YTN; PAM sequence: CTT
  source 1..20: mol_type = other DNA
tgaatgactaaacataattt

SEQ ID NO: 10328 - DNA, 20 bp, synthetic construct
  misc_feature 1..20: note = Description of Artificial Sequence: Synthetic oligonucleotide
  misc_feature 1..20: note = Target: ANGPTL3; (-) strand; PAM type: YTN; PAM sequence: CTA
  source 1..20: mol_type = other DNA
tcataccagaccctttgaat

SEQ ID NO: 10329 - DNA, 20 bp, synthetic construct
  misc_feature 1..20: note = Description of Artificial Sequence: Synthetic oligonucleotide
  misc_feature 1..20: note = Target: ANGPTL3; (-) strand; PAM type: YTN; PAM sequence: TTG
  source 1..20: mol_type = other DNA
ggtctatcataccagaccct

SEQ ID NO: 10330 - DNA, 20 bp, synthetic construct
  misc_feature 1..20: note = Description of Artificial Sequence: Synthetic oligonucleotide
  misc_feature 1..20: note = Target: ANGPTL3; (-) strand; PAM type: YTN; PAM sequence: TTT
  source 1..20: mol_type = other DNA
gggtctatcataccagaccc

SEQ ID NO: 10331 - DNA, 20 bp, synthetic construct
  misc_feature 1..20: note = Description of Artificial Sequence: Synthetic oligonucleotide
  misc_feature 1..20: note = Target: ANGPTL3; (-) strand; PAM type: YTN; PAM sequence: TTT
  source 1..20: mol_type = other DNA
tgggtctatcataccagacc

SEQ ID NO: 10332 - DNA, 20 bp, synthetic construct
  misc_feature 1..20: note = Description of Artificial Sequence: Synthetic oligonucleotide
  misc_feature 1..20: note = Target: ANGPTL3; (-) strand; PAM type: YTN; PAM sequence: TTA
  source 1..20: mol_type = other DNA
acattttgggtctatcatac

SEQ ID NO: 10333 - DNA, 20 bp, synthetic construct
  misc_feature 1..20: note = Description of Artificial Sequence: Synthetic oligonucleotide
  misc_feature 1..20: note = Target: ANGPTL3; (-) strand; PAM type: YTN; PAM sequence: CTA
  source 1..20: mol_type = other DNA
ttaacattttgggtctatca

SEQ ID NO: 10334 - DNA, 20 bp, synthetic construct
  misc_feature 1..20: note = Description of Artificial Sequence: Synthetic oligonucleotide
  misc_feature 1..20: note = Target: ANGPTL3; (-) strand; PAM type: YTN; PAM sequence: CTC
  source 1..20: mol_type = other DNA
tattaacattttgggtctat

SEQ ID NO: 10335 - DNA, 20 bp, synthetic construct
  misc_feature 1..20: note = Description of Artificial Sequence: Synthetic oligonucleotide
  misc_feature 1..20: note = Target: ANGPTL3; (-) strand; PAM type: YTN; PAM sequence: CTC
  source 1..20: mol_type = other DNA
gactctattaacattttggg

SEQ ID NO: 10336 - DNA, 20 bp, synthetic construct
  misc_feature 1..20: note = Description of Artificial Sequence: Synthetic oligonucleotide
  misc_feature 1..20: note = Target: ANGPTL3; (-) strand; PAM type: YTN; PAM sequence: CTA
  source 1..20: mol_type = other DNA
taaaaaataaaaatctcgac

SEQ ID NO: 10337 - DNA, 20 bp, synthetic construct
  misc_feature 1..20: note = Description of Artificial Sequence: Synthetic oligonucleotide
  misc_feature 1..20: note = Target: ANGPTL3; (-) strand; PAM type: YTN; PAM sequence: TTC
  source 1..20: mol_type = other DNA
aaaaacctataaaaaataaa

SEQ ID NO: 10338 - DNA, 20 bp, synthetic construct
  misc_feature 1..20: note = Description of Artificial Sequence: Synthetic oligonucleotide
  misc_feature 1..20: note = Target: ANGPTL3; (-) strand; PAM type: YTN; PAM sequence: TTT
  source 1..20: mol_type = other DNA
caaaaacctataaaaaataa

SEQ ID NO: 10339 - DNA, 20 bp, synthetic construct
  misc_feature 1..20: note = Description of Artificial Sequence: Synthetic oligonucleotide
  misc_feature 1..20: note = Target: ANGPTL3; (-) strand; PAM type: YTN; PAM sequence: TTC
  source 1..20: mol_type = other DNA
aggtatttcaaaaacctata

SEQ ID NO: 10340 - DNA, 20 bp, synthetic construct
  misc_feature 1..20: note = Description of Artificial Sequence: Synthetic oligonucleotide
  misc_feature 1..20: note = Target: ANGPTL3; (-) strand; PAM type: YTN; PAM sequence: TTG
  source 1..20: mol_type = other DNA
tgaaaattcaggtatttcaa

SEQ ID NO: 10341 - DNA, 20 bp, synthetic construct
  misc_feature 1..20: note = Description of Artificial Sequence: Synthetic oligonucleotide
  misc_feature 1..20: note = Target: ANGPTL3; (-) strand; PAM type: YTN; PAM sequence: TTA
  source 1..20: mol_type = other DNA
ttgtgaaaattcaggtattt

SEQ ID NO: 10342 - DNA, 20 bp, synthetic construct
  misc_feature 1..20: note = Description of Artificial Sequence: Synthetic oligonucleotide
  misc_feature 1..20: note = Target: ANGPTL3; (-) strand; PAM type: YTN; PAM sequence: CTT
  source 1..20: mol_type = other DNA
attgtgaaaattcaggtatt

SEQ ID NO: 10343 - DNA, 20 bp, synthetic construct
  misc_feature 1..20: note = Description of Artificial Sequence: Synthetic oligonucleotide
  misc_feature 1..20: note = Target: ANGPTL3; (-) strand; PAM type: YTN; PAM sequence: TTA
  source 1..20: mol_type = other DNA
atgtgcaaagtacttattgt

SEQ ID NO: 10344 - DNA, 20 bp, synthetic construct
  misc_feature 1..20: note = Description of Artificial Sequence: Synthetic oligonucleotide
  misc_feature 1..20: note = Target: ANGPTL3; (-) strand; PAM type: YTN; PAM sequence: TTT
  source 1..20: mol_type = other DNA
aatgtgcaaagtacttattg

SEQ ID NO: 10345 - DNA, 20 bp, synthetic construct
  misc_feature 1..20: note = Description of Artificial Sequence: Synthetic oligonucleotide
  misc_feature 1..20: note = Target: ANGPTL3; (-) strand; PAM type: YTN; PAM sequence: TTT
  source 1..20: mol_type = other DNA
taatgtgcaaagtacttatt

SEQ ID NO: 10346 - DNA, 20 bp, synthetic construct
  misc_feature 1..20: note = Description of Artificial Sequence: Synthetic oligonucleotide
  misc_feature 1..20: note = Target: ANGPTL3; (-) strand; PAM type: YTN; PAM sequence: TTT
  source 1..20: mol_type = other DNA
ttaatgtgcaaagtacttat

SEQ ID NO: 10347 - DNA, 20 bp, synthetic construct
  misc_feature 1..20: note = Description of Artificial Sequence: Synthetic oligonucleotide
  misc_feature 1..20: note = Target: ANGPTL3; (-) strand; PAM type: YTN; PAM sequence: CTA
  source 1..20: mol_type = other DNA
agatttttaatgtgcaaagt

SEQ ID NO: 10348 - DNA, 20 bp, synthetic construct
  misc_feature 1..20: note = Description of Artificial Sequence: Synthetic oligonucleotide
  misc_feature 1..20: note = Target: ANGPTL3; (-) strand; PAM type: YTN; PAM sequence: TTA
  source 1..20: mol_type = other DNA
caagcgtgagccaccatgcc

SEQ ID NO: 10349 - DNA, 20 bp, synthetic construct
  misc_feature 1..20: note = Description of Artificial Sequence: Synthetic oligonucleotide
  misc_feature 1..20: note = Target: ANGPTL3; (-) strand; PAM type: YTN; PAM sequence: CTG
  source 1..20: mol_type = other DNA
ggattacaagcgtgagccac

SEQ ID NO: 10350 - DNA, 20 bp, synthetic construct
  misc_feature 1..20: note = Description of Artificial Sequence: Synthetic oligonucleotide
  misc_feature 1..20: note = Target: ANGPTL3; (-) strand; PAM type: YTN; PAM sequence: CTC
  source 1..20: mol_type = other DNA
ccagagtgctgggattacaa

SEQ ID NO: 10351 - DNA, 20 bp, synthetic construct
  misc_feature 1..20: note = Description of Artificial Sequence: Synthetic oligonucleotide
  misc_feature 1..20: note = Target: ANGPTL3; (-) strand; PAM type: YTN; PAM sequence: TTG
  source 1..20: mol_type = other DNA
gcctcccagagtgctgggat

SEQ ID NO: 10352 - DNA, 20 bp, synthetic construct
  misc_feature 1..20: note = Description of Artificial Sequence: Synthetic oligonucleotide
  misc_feature 1..20: note = Target: ANGPTL3; (-) strand; PAM type: YTN; PAM sequence: CTT
  source 1..20: mol_type = other DNA
ggcctcccagagtgctggga

SEQ ID NO: 10353 - DNA, 20 bp, synthetic construct
  misc_feature 1..20: note = Description of Artificial Sequence: Synthetic oligonucleotide
  misc_feature 1..20: note = Target: ANGPTL3; (-) strand; PAM type: YTN; PAM sequence: CTA
  source 1..20: mol_type = other DNA
ccttggcctcccagagtgct

SEQ ID NO: 10354 - DNA, 20 bp, synthetic construct
  misc_feature 1..20: note = Description of Artificial Sequence: Synthetic oligonucleotide
  misc_feature 1..20: note = Target: ANGPTL3; (-) strand; PAM type: YTN; PAM sequence: CTG
  source 1..20: mol_type = other DNA
cctaccttggcctcccagag

SEQ ID NO: 10355 - DNA, 20 bp, synthetic construct
  misc_feature 1..20: note = Description of Artificial Sequence: Synthetic oligonucleotide
  misc_feature 1..20: note = Target: ANGPTL3; (-) strand; PAM type: YTN; PAM sequence: CTC
  source 1..20: mol_type = other DNA
aggtgatctgcctaccttgg

SEQ ID NO: 10356 - DNA, 20 bp, synthetic construct
  misc_feature 1..20: note = Description of Artificial Sequence: Synthetic oligonucleotide
  misc_feature 1..20: note = Target: ANGPTL3; (-) strand; PAM type: YTN; PAM sequence: CTG
  source 1..20: mol_type = other DNA
acctcaggtgatctgcctac

SEQ ID NO: 10357 - DNA, 20 bp, synthetic construct
  misc_feature 1..20: note = Description of Artificial Sequence: Synthetic oligonucleotide
  misc_feature 1..20: note = Target: ANGPTL3; (-) strand; PAM type: YTN; PAM sequence: CTC
  source 1..20: mol_type = other DNA
ctgacctcaggtgatctgcc

SEQ ID NO: 10358 - DNA, 20 bp, synthetic construct
  misc_feature 1..20: note = Description of Artificial Sequence: Synthetic oligonucleotide
  misc_feature 1..20: note = Target: ANGPTL3; (-) strand; PAM type: YTN; PAM sequence: CTC
  source 1..20: mol_type = other DNA
gaactcctgacctcaggtga

SEQ ID NO: 10359 - DNA, 20 bp, synthetic construct
  misc_feature 1..20: note = Description of Artificial Sequence: Synthetic oligonucleotide
  misc_feature 1..20: note = Target: ANGPTL3; (-) strand; PAM type: YTN; PAM sequence: CTG
  source 1..20: mol_type = other DNA
gtctcgaactcctgacctca

SEQ ID NO: 10360 - DNA, 20 bp, synthetic construct
  misc_feature 1..20: note = Description of Artificial Sequence: Synthetic oligonucleotide
  misc_feature 1..20: note = Target: ANGPTL3; (-) strand; PAM type: YTN; PAM sequence: TTG
  source 1..20: mol_type = other DNA
gccagactggtctcgaactc

SEQ ID NO: 10361 - DNA, 20 bp, synthetic construct
  misc_feature 1..20: note = Description of Artificial Sequence: Synthetic oligonucleotide
  misc_feature 1..20: note = Target: ANGPTL3; (-) strand; PAM type: YTN; PAM sequence: TTC
  source 1..20: mol_type = other DNA
accatgttggccagactggt

SEQ ID NO: 10362 - DNA, 20 bp, synthetic construct
  misc_feature 1..20: note = Description of Artificial Sequence: Synthetic oligonucleotide
  misc_feature 1..20: note = Target: ANGPTL3; (-) strand; PAM type: YTN; PAM sequence: TTT
  source 1..20: mol_type = other DNA
caccatgttggccagactgg

SEQ ID NO: 10363 - DNA, 20 bp, synthetic construct
  misc_feature 1..20: note = Description of Artificial Sequence: Synthetic oligonucleotide
  misc_feature 1..20: note = Target: ANGPTL3; (-) strand; PAM type: YTN; PAM sequence: TTA
  source 1..20: mol_type = other DNA
gtagagacggggtttcacca

SEQ ID NO: 10364 - DNA, 20 bp, synthetic construct
  misc_feature 1..20: note = Description of Artificial Sequence: Synthetic oligonucleotide
  misc_feature 1..20: note = Target: ANGPTL3; (-) strand; PAM type: YTN; PAM sequence: TTT
  source 1..20: mol_type = other DNA
agtagagacggggtttcacc

SEQ ID NO: 10365 - DNA, 20 bp, synthetic construct
  misc_feature 1..20: note = Description of Artificial Sequence: Synthetic oligonucleotide
  misc_feature 1..20: note = Target: ANGPTL3; (-) strand; PAM type: YTN; PAM sequence: TTT
  source 1..20: mol_type = other DNA
tagtagagacggggtttcac

SEQ ID NO: 10366 - DNA, 20 bp, synthetic construct
  misc_feature 1..20: note = Description of Artificial Sequence: Synthetic oligonucleotide
  misc_feature 1..20: note = Target: ANGPTL3; (-) strand; PAM type: YTN; PAM sequence: TTT
  source 1..20: mol_type = other DNA
ttagtagagacggggtttca

SEQ ID NO: 10367 - DNA, 20 bp, synthetic construct
  misc_feature 1..20: note = Description of Artificial Sequence: Synthetic oligonucleotide
  misc_feature 1..20: note = Target: ANGPTL3; (-) strand; PAM type: YTN; PAM sequence: TTG
  source 1..20: mol_type = other DNA
tatttttagtagagacgggg

SEQ ID NO: 10368 - DNA, 20 bp, synthetic construct
  misc_feature 1..20: note = Description of Artificial Sequence: Synthetic oligonucleotide
  misc_feature 1..20: note = Target: ANGPTL3; (-) strand; PAM type: YTN; PAM sequence: TTT
  source 1..20: mol_type = other DNA
gtatttttagtagagacggg

SEQ ID NO: 10369 - DNA, 20 bp, synthetic construct
  misc_feature 1..20: note = Description of Artificial Sequence: Synthetic oligonucleotide
  misc_feature 1..20: note = Target: ANGPTL3; (-) strand; PAM type: YTN; PAM sequence: TTT
  source 1..20: mol_type = other DNA
tgtatttttagtagagacgg

SEQ ID NO: 10370 - DNA, 20 bp, synthetic construct
  misc_feature 1..20: note = Description of Artificial Sequence: Synthetic oligonucleotide
  misc_feature 1..20: note = Target: ANGPTL3; (-) strand; PAM type: YTN; PAM sequence: TTT
  source 1..20: mol_type = other DNA
ttgtatttttagtagagacg

SEQ ID NO: 10371 - DNA, 20 bp, synthetic construct
  misc_feature 1..20: note = Description of Artificial Sequence: Synthetic oligonucleotide
  misc_feature 1..20: note = Target: ANGPTL3; (-) strand; PAM type: YTN; PAM sequence: CTA
  source 1..20: mol_type = other DNA
atttttgtatttttagtaga

SEQ ID NO: 10372 - DNA, 20 bp, synthetic construct
  misc_feature 1..20: note = Description of Artificial Sequence: Synthetic oligonucleotide
  misc_feature 1..20: note = Target: ANGPTL3; (-) strand; PAM type: YTN; PAM sequence: CTG
  source 1..20: mol_type = other DNA
gctaatttttgtatttttag

SEQ ID NO: 10373 - DNA, 20 bp, synthetic construct
  misc_feature 1..20: note = Description of Artificial Sequence: Synthetic oligonucleotide
  misc_feature 1..20: note = Target: ANGPTL3; (-) strand; PAM type: YTN; PAM sequence: TTA
  source 1..20: mol_type = other DNA
caggcacccccaaccaagcc

SEQ ID NO: 10374 - DNA, 20 bp, synthetic construct
  misc_feature 1..20: note = Description of Artificial Sequence: Synthetic oligonucleotide
  misc_feature 1..20: note = Target: ANGPTL3; (-) strand; PAM type: YTN; PAM sequence: CTG
  source 1..20: mol_type = other DNA
gaattacaggcacccccaac

SEQ ID NO: 10375 - DNA, 20 bp, synthetic construct
  misc_feature 1..20: note = Description of Artificial Sequence: Synthetic oligonucleotide
  misc_feature 1..20: note = Target: ANGPTL3; (-) strand; PAM type: YTN; PAM sequence: TTC
  source 1..20: mol_type = other DNA
ccgagtatctggaattacag

SEQ ID NO: 10376 - DNA, 20 bp, synthetic construct
  misc_feature 1..20: note = Description of Artificial Sequence: Synthetic oligonucleotide
  misc_feature 1..20: note = Target: ANGPTL3; (-) strand; PAM type: YTN; PAM sequence: CTT
  source 1..20: mol_type = other DNA
cccgagtatctggaattaca

SEQ ID NO: 10377 - DNA, 20 bp, synthetic construct
  misc_feature 1..20: note = Description of Artificial Sequence: Synthetic oligonucleotide
  misc_feature 1..20: note = Target: ANGPTL3; (-) strand; PAM type: YTN; PAM sequence: CTC
  source 1..20: mol_type = other DNA
agcttcccgagtatctggaa

SEQ ID NO: 10378 - DNA, 20 bp, synthetic construct
  misc_feature 1..20: note = Description of Artificial Sequence: Synthetic oligonucleotide
  misc_feature 1..20: note = Target: ANGPTL3; (-) strand; PAM type: YTN; PAM sequence: CTG
  source 1..20: mol_type = other DNA
tctcagcttcccgagtatct

SEQ ID NO: 10379 - DNA, 20 bp, synthetic construct
  misc_feature 1..20: note = Description of Artificial Sequence: Synthetic oligonucleotide
  misc_feature 1..20: note = Target: ANGPTL3; (-) strand; PAM type: YTN; PAM sequence: CTC
  source 1..20: mol_type = other DNA
ctgtctcagcttcccgagta

SEQ ID NO: 10380 - DNA, 20 bp, synthetic construct
  misc_feature 1..20: note = Description of Artificial Sequence: Synthetic oligonucleotide
  misc_feature 1..20: note = Target: ANGPTL3; (-) strand; PAM type: YTN; PAM sequence: TTC
  source 1..20: mol_type = other DNA
tcctgtctcagcttcccgag

SEQ ID NO: 10381 - DNA, 20 bp, synthetic construct
  misc_feature 1..20: note = Description of Artificial Sequence: Synthetic oligonucleotide
  misc_feature 1..20: note = Target: ANGPTL3; (-) strand; PAM type: YTN; PAM sequence: TTC
  source 1..20: mol_type = other DNA
aagcgattctcctgtctcag

SEQ ID NO: 10382 - DNA, 20 bp, synthetic construct
  misc_feature 1..20: note = Description of Artificial Sequence: Synthetic oligonucleotide
  misc_feature 1..20: note = Target: ANGPTL3; (-) strand; PAM type: YTN; PAM sequence: CTG
  source 1..20: mol_type = other DNA
ggttcaagcgattctcctgt

SEQ ID NO: 10383 - DNA, 20 bp, synthetic construct
  misc_feature 1..20: note = Description of Artificial Sequence: Synthetic oligonucleotide
  misc_feature 1..20: note = Target: ANGPTL3; (-) strand; PAM type: YTN; PAM sequence: CTC
  source 1..20: mol_type = other DNA
ctgggttcaagcgattctcc

SEQ ID NO: 10384 - DNA, 20 bp, synthetic construct
  misc_feature 1..20: note = Description of Artificial Sequence: Synthetic oligonucleotide
  misc_feature 1..20: note = Target: ANGPTL3; (-) strand; PAM type: YTN; PAM sequence: TTC
  source 1..20: mol_type = other DNA
cccctcctgggttcaagcga

SEQ ID NO: 10385 - DNA, 20 bp, synthetic construct
  misc_feature 1..20: note = Description of Artificial Sequence: Synthetic oligonucleotide
  misc_feature 1..20: note = Target: ANGPTL3; (-) strand; PAM type: YTN; PAM sequence: CTT
  source 1..20: mol_type = other DNA
ccccctcctgggttcaagcg

SEQ ID NO: 10386 - DNA, 20 bp, synthetic construct
  misc_feature 1..20: note = Description of Artificial Sequence: Synthetic oligonucleotide
  misc_feature 1..20: note = Target: ANGPTL3; (-) strand; PAM type: YTN; PAM sequence: CTG
  source 1..20: mol_type = other DNA
caacttccccctcctgggtt

SEQ ID NO: 10387 - DNA, 20 bp, synthetic construct
  misc_feature 1..20: note = Description of Artificial Sequence: Synthetic oligonucleotide
  misc_feature 1..20: note = Target: ANGPTL3; (-) strand; PAM type: YTN; PAM sequence: CTC
  source 1..20: mol_type = other DNA
actgcaacttccccctcctg

SEQ ID NO: 10388 - DNA, 20 bp, synthetic construct
  misc_feature 1..20: note = Description of Artificial Sequence: Synthetic oligonucleotide
  misc_feature 1..20: note = Target: ANGPTL3; (-) strand; PAM type: YTN; PAM sequence: CTC
  source 1..20: mol_type = other DNA
agctcactgcaacttccccc

SEQ ID NO: 10389 - DNA, 20 bp, synthetic construct
  misc_feature 1..20: note = Description of Artificial Sequence: Synthetic oligonucleotide
  misc_feature 1..20: note = Target: ANGPTL3; (-) strand; PAM type: YTN; PAM sequence: CTG
  source 1..20: mol_type = other DNA
gagtgcagcgtcgtgatctc

SEQ ID NO: 10390 - DNA, 20 bp, synthetic construct
  misc_feature 1..20: note = Description of Artificial Sequence: Synthetic oligonucleotide
  misc_feature 1..20: note = Target: ANGPTL3; (-) strand; PAM type: YTN; PAM sequence: TTG
  source 1..20: mol_type = other DNA
cccaggctggagtgcagcgt

SEQ ID NO: 10391 - DNA, 20 bp, synthetic construct
  misc_feature 1..20: note = Description of Artificial Sequence: Synthetic oligonucleotide
  misc_feature 1..20: note = Target: ANGPTL3; (-) strand; PAM type: YTN; PAM sequence: TTG
  source 1..20: mol_type = other DNA
ttgcccaggctggagtgcag

SEQ ID NO: 10392 - DNA, 20 bp, synthetic construct
  misc_feature 1..20: note = Description of Artificial Sequence: Synthetic oligonucleotide
  misc_feature 1..20: note = Target: ANGPTL3; (-) strand; PAM type: YTN; PAM sequence: TTT
  source 1..20: mol_type = other DNA
gttgcccaggctggagtgca

SEQ ID NO: 10393 - DNA, 20 bp, synthetic construct
  misc_feature 1..20: note = Description of Artificial Sequence: Synthetic oligonucleotide
  misc_feature 1..20: note = Target: ANGPTL3; (-) strand; PAM type: YTN; PAM sequence: CTT
  source 1..20: mol_type = other DNA
tgttgcccaggctggagtgc

SEQ ID NO: 10394 - DNA, 20 bp, synthetic construct
  misc_feature 1..20: note = Description of Artificial Sequence: Synthetic oligonucleotide
  misc_feature 1..20: note = Target: ANGPTL3; (-) strand; PAM type: YTN; PAM sequence: CTC
  source 1..20: mol_type = other DNA
tttgttgcccaggctggagt

SEQ ID NO: 10395 - DNA, 20 bp, synthetic construct
  misc_feature 1..20: note = Description of Artificial Sequence: Synthetic oligonucleotide
  misc_feature 1..20: note = Target: ANGPTL3; (-) strand; PAM type: YTN; PAM sequence: TTG
  source 1..20: mol_type = other DNA
ctctttgttgcccaggctgg

SEQ ID NO: 10396 - DNA, 20 bp, synthetic construct
  misc_feature 1..20: note = Description of Artificial Sequence: Synthetic oligonucleotide
  misc_feature 1..20: note = Target: ANGPTL3; (-) strand; PAM type: YTN; PAM sequence: TTT
  source 1..20: mol_type = other DNA
gctctttgttgcccaggctg

SEQ ID NO: 10397 - DNA, 20 bp, synthetic construct
  misc_feature 1..20: note = Description of Artificial Sequence: Synthetic oligonucleotide
  misc_feature 1..20: note = Target: ANGPTL3; (-) strand; PAM type: YTN; PAM sequence: TTT
  source 1..20: mol_type = other DNA
tgctctttgttgcccaggct

SEQ ID NO: 10398 - DNA, 20 bp, synthetic construct
  misc_feature 1..20: note = Description of Artificial Sequence: Synthetic oligonucleotide
  misc_feature 1..20: note = Target: ANGPTL3; (-) strand; PAM type: YTN; PAM sequence: TTG
  source 1..20: mol_type = other DNA
agacggagttttgctctttg

SEQ ID NO: 10399 - DNA, 20 bp, synthetic construct
  misc_feature 1..20: note = Description of Artificial Sequence: Synthetic oligonucleotide
  misc_feature 1..20: note = Target: ANGPTL3; (-) strand; PAM type: YTN; PAM sequence: TTT
  source 1..20: mol_type = other DNA
gagacggagttttgctcttt

SEQ ID NO: 10400 - DNA, 20 bp, synthetic construct
  misc_feature 1..20: note = Description of Artificial Sequence: Synthetic oligonucleotide
  misc_feature 1..20: note = Target: ANGPTL3; (-) strand; PAM type: YTN; PAM sequence: TTT
  source 1..20: mol_type = other DNA
tgagacggagttttgctctt

SEQ ID NO: 10401 - DNA, 20 bp, synthetic construct
  misc_feature 1..20: note = Description of Artificial Sequence: Synthetic oligonucleotide
  misc_feature 1..20: note = Target: ANGPTL3; (-) strand; PAM type: YTN; PAM sequence: TTT
  source 1..20: mol_type = other DNA
ttgagacggagttttgctct

SEQ ID NO: 10402 - DNA, 20 bp, synthetic construct
  misc_feature 1..20: note = Description of Artificial Sequence: Synthetic oligonucleotide
  misc_feature 1..20: note = Target: ANGPTL3; (-) strand; PAM type: YTN; PAM sequence: TTA
  source 1..20: mol_type = other DNA
tttttgagacggagttttgc

SEQ ID NO: 10403 - DNA, 20 bp, synthetic construct
  misc_feature 1..20: note = Description of Artificial Sequence: Synthetic oligonucleotide
  misc_feature 1..20: note = Target: ANGPTL3; (-) strand; PAM type: YTN; PAM sequence: TTT
  source 1..20: mol_type = other DNA
atttttgagacggagttttg

SEQ ID NO: 10404 - DNA, 20 bp, synthetic construct
  misc_feature 1..20: note = Description of Artificial Sequence: Synthetic oligonucleotide
  misc_feature 1..20: note = Target: ANGPTL3; (-) strand; PAM type: YTN; PAM sequence: TTA
  source 1..20: mol_type = other DNA
tttatttttgagacggagtt

SEQ ID NO: 10405 - DNA, 20 bp, synthetic construct
  misc_feature 1..20: note = Description of Artificial Sequence: Synthetic oligonucleotide
  misc_feature 1..20: note = Target: ANGPTL3; (-) strand; PAM type: YTN; PAM sequence: TTT
  source 1..20: mol_type = other DNA
atttatttttgagacggagt

SEQ ID NO: 10406 - DNA, 20 bp, synthetic construct
  misc_feature 1..20: note = Description of Artificial Sequence: Synthetic oligonucleotide
  misc_feature 1..20: note = Target: ANGPTL3; (-) strand; PAM type: YTN; PAM sequence: CTT
  source 1..20: mol_type = other DNA
tatttatttttgagacggag

SEQ ID NO: 10407 - DNA, 20 bp, synthetic construct
  misc_feature 1..20: note = Description of Artificial Sequence: Synthetic oligonucleotide
  misc_feature 1..20: note = Target: ANGPTL3; (-) strand; PAM type: YTN; PAM sequence: TTC
  source 1..20: mol_type = other DNA
tttatttatttttgagacgg

SEQ ID NO: 10408 - DNA, 20 bp, synthetic construct
  misc_feature 1..20: note = Description of Artificial Sequence: Synthetic oligonucleotide
  misc_feature 1..20: note = Target: ANGPTL3; (-) strand; PAM type: YTN; PAM sequence: TTT
  source 1..20: mol_type = other DNA
ctttatttatttttgagacg

SEQ ID NO: 10409 - DNA, 20 bp, synthetic construct
  misc_feature 1..20: note = Description of Artificial Sequence: Synthetic oligonucleotide
  misc_feature 1..20: note = Target: ANGPTL3; (-) strand; PAM type: YTN; PAM sequence: TTT
  source 1..20: mol_type = other DNA
tctttatttatttttgagac

SEQ ID NO: 10410 - DNA, 20 bp, synthetic construct
  misc_feature 1..20: note = Description of Artificial Sequence: Synthetic oligonucleotide
  misc_feature 1..20: note = Target: ANGPTL3; (-) strand; PAM type: YTN; PAM sequence: TTT
  source 1..20: mol_type = other DNA
ttctttatttatttttgaga

SEQ ID NO: 10411 - DNA, 20 bp, synthetic construct
  misc_feature 1..20: note = Description of Artificial Sequence: Synthetic oligonucleotide
  misc_feature 1..20: note = Target: ANGPTL3; (-) strand; PAM type: YTN; PAM sequence: TTT
  source 1..20: mol_type = other DNA
tttctttatttatttttgag

SEQ ID NO: 10412 - DNA, 20 bp, synthetic construct
  misc_feature 1..20: note = Description of Artificial Sequence: Synthetic oligonucleotide
  misc_feature 1..20: note = Target: ANGPTL3; (-) strand; PAM type: YTN; PAM sequence: TTG
  source 1..20: mol_type = other DNA
gacatgtaaagattttttct

SEQ ID NO: 10413 - DNA, 20 bp, synthetic construct
  misc_feature 1..20: note = Description of Artificial Sequence: Synthetic oligonucleotide
  misc_feature 1..20: note = Target: ANGPTL3; (-) strand; PAM type: YTN; PAM sequence: TTT
  source 1..20: mol_type = other DNA
ggacatgtaaagattttttc

SEQ ID NO: 10414 - DNA, 20 bp, synthetic construct
  misc_feature 1..20: note = Description of Artificial Sequence: Synthetic oligonucleotide
  misc_feature 1..20: note = Target: ANGPTL3; (-) strand; PAM type: YTN; PAM sequence: CTT
  source 1..20: mol_type = other DNA
tggacatgtaaagatttttt

SEQ ID NO: 10415 - DNA, 20 bp, synthetic construct
  misc_feature 1..20: note = Description of Artificial Sequence: Synthetic oligonucleotide
  misc_feature 1..20: note = Target: ANGPTL3; (-) strand; PAM type: YTN; PAM sequence: TTG
  source 1..20: mol_type = other DNA
aacagccgtatctttggaca

SEQ ID NO: 10416 - DNA, 20 bp, synthetic construct
  misc_feature 1..20: note = Description of Artificial Sequence: Synthetic oligonucleotide
  misc_feature 1..20: note = Target: ANGPTL3; (-) strand; PAM type: YTN; PAM sequence: TTA
  source 1..20: mol_type = other DNA
gttgaacagccgtatctttg

SEQ ID NO: 10417 - DNA, 20 bp, synthetic construct
  misc_feature 1..20: note = Description of Artificial Sequence: Synthetic oligonucleotide
  misc_feature 1..20: note = Target: ANGPTL3; (-) strand; PAM type: YTN; PAM sequence: TTT
  source 1..20: mol_type = other DNA
agttgaacagccgtatcttt

SEQ ID NO: 10418 - DNA, 20 bp, synthetic construct
  misc_feature 1..20: note = Description of Artificial Sequence: Synthetic oligonucleotide
  misc_feature 1..20: note = Target: ANGPTL3; (-) strand; PAM type: YTN; PAM sequence: TTT
  source 1..20: mol_type = other DNA
tagttgaacagccgtatctt

SEQ ID NO: 10419 - DNA, 20 bp, synthetic construct
  misc_feature 1..20: note = Description of Artificial Sequence: Synthetic oligonucleotide
  misc_feature 1..20: note = Target: ANGPTL3; (-) strand; PAM type: YTN; PAM sequence: TTT
  source 1..20: mol_type = other DNA
ttagttgaacagccgtatct

SEQ ID NO: 10420 - DNA, 20 bp, synthetic construct
  misc_feature 1..20: note = Description of Artificial Sequence: Synthetic oligonucleotide
  misc_feature 1..20: note = Target: ANGPTL3; (-) strand; PAM type: YTN; PAM sequence: TTT
  source 1..20: mol_type = other DNA
tttagttgaacagccgtatc

SEQ ID NO: 10421 - DNA, 20 bp, synthetic construct
  misc_feature 1..20: note = Description of Artificial Sequence: Synthetic oligonucleotide
  misc_feature 1..20: note = Target: ANGPTL3; (-) strand; PAM type: YTN; PAM sequence: TTA
  source 1..20: mol_type = other DNA
tacatatatattttttagtt

SEQ ID NO: 10422 - DNA, 20 bp, synthetic construct
  misc_feature 1..20: note = Description of Artificial Sequence: Synthetic oligonucleotide
  misc_feature 1..20: note = Target: ANGPTL3; (-) strand; PAM type: YTN; PAM sequence: TTT
  source 1..20: mol_type = other DNA
atacatatatattttttagt

SEQ ID NO: 10423 - DNA, 20 bp, synthetic construct
  misc_feature 1..20: note = Description of Artificial Sequence: Synthetic oligonucleotide
  misc_feature 1..20: note = Target: ANGPTL3; (-) strand; PAM type: YTN; PAM sequence: TTT
  source 1..20: mol_type = other DNA
tatacatatatattttttag

SEQ ID NO: 10424 - DNA, 20 bp, synthetic construct
  misc_feature 1..20: note = Description of Artificial Sequence: Synthetic oligonucleotide
  misc_feature 1..20: note = Target: ANGPTL3; (-) strand; PAM type: YTN; PAM sequence: TTA
  source 1..20: mol_type = other DNA
agttttatacatatatattt

SEQ ID NO: 10425 - DNA, 20 bp, synthetic construct
  misc_feature 1..20: note = Description of Artificial Sequence: Synthetic oligonucleotide
  misc_feature 1..20: note = Target: ANGPTL3; (-) strand; PAM type: YTN; PAM sequence: TTA
  source 1..20: mol_type = other DNA
acatgttaagttttatacat

SEQ ID NO: 10426 - DNA, 20 bp, synthetic construct
  misc_feature 1..20: note = Description of Artificial Sequence: Synthetic oligonucleotide
  misc_feature 1..20: note = Target: ANGPTL3; (-) strand; PAM type: YTN; PAM sequence: CTA
  source 1..20: mol_type = other DNA
ttaacatgttaagttttata

SEQ ID NO: 10427 - DNA, 20 bp, synthetic construct
  misc_feature 1..20: note = Description of Artificial Sequence: Synthetic oligonucleotide
  misc_feature 1..20: note = Target: ANGPTL3; (-) strand; PAM type: YTN; PAM sequence: TTC
  source 1..20: mol_type = other DNA
actattaacatgttaagttt

SEQ ID NO: 10428 - DNA, 20 bp, synthetic construct
  misc_feature 1..20: note = Description of Artificial Sequence: Synthetic oligonucleotide
  misc_feature 1..20: note = Target: ANGPTL3; (-) strand; PAM type: YTN; PAM sequence: TTG
  source 1..20: mol_type = other DNA
tgtgttcactattaacatgt

SEQ ID NO: 10429 - DNA, 20 bp, synthetic construct
  misc_feature 1..20: note = Description of Artificial Sequence: Synthetic oligonucleotide
  misc_feature 1..20: note = Target: ANGPTL3; (-) strand; PAM type: YTN; PAM sequence: TTT
  source 1..20: mol_type = other DNA
gtgtgttcactattaacatg

SEQ ID NO: 10430 - DNA, 20 bp, synthetic construct
  misc_feature 1..20: note = Description of Artificial Sequence: Synthetic oligonucleotide
  misc_feature 1..20: note = Target: ANGPTL3; (-) strand; PAM type: YTN; PAM sequence: TTT
  source 1..20: mol_type = other DNA
tgtgtgttcactattaacat

SEQ ID NO: 10431 - DNA, 20 bp, synthetic construct
  misc_feature 1..20: note = Description of Artificial Sequence: Synthetic oligonucleotide
  misc_feature 1..20: note = Target: ANGPTL3; (-) strand; PAM type: YTN; PAM sequence: CTG
  source 1..20: mol_type = other DNA
ttttgtgtgttcactattaa

SEQ ID NO: 10432 - DNA, 20 bp, synthetic construct
  misc_feature 1..20: note = Description of Artificial Sequence: Synthetic oligonucleotide
  misc_feature 1..20: note = Target: ANGPTL3; (-) strand; PAM type: YTN; PAM sequence: TTA
  source 1..20: mol_type = other DNA
ctgttttgtgtgttcactat

SEQ ID NO: 10433 - DNA, 20 bp, synthetic construct
  misc_feature 1..20: note = Description of Artificial Sequence: Synthetic oligonucleotide
  misc_feature 1..20: note = Target: ANGPTL3; (-) strand; PAM type: YTN; PAM sequence: CTT
  source 1..20: mol_type = other DNA
actgttttgtgtgttcacta

SEQ ID NO: 10434 - DNA, 20 bp, synthetic construct
  misc_feature 1..20: note = Description of Artificial Sequence: Synthetic oligonucleotide
  misc_feature 1..20: note = Target: ANGPTL3; (-) strand; PAM type: YTN; PAM sequence: CTA
  source 1..20: mol_type = other DNA
tcttactgttttgtgtgttc

SEQ ID NO: 10435 - DNA, 20 bp, synthetic construct
  misc_feature 1..20: note = Description of Artificial Sequence: Synthetic oligonucleotide
  misc_feature 1..20: note = Target: ANGPTL3; (-) strand; PAM type: YTN; PAM sequence: TTA
  source 1..20: mol_type = other DNA
tctatcttactgttttgtgt

SEQ ID NO: 10436 - DNA, 20 bp, synthetic construct
  misc_feature 1..20: note = Description of Artificial Sequence: Synthetic oligonucleotide
  misc_feature 1..20: note = Target: ANGPTL3; (-) strand; PAM type: YTN; PAM sequence: TTT
  source 1..20: mol_type = other DNA
atctatcttactgttttgtg

SEQ ID NO: 10437 - DNA, 20 bp, synthetic construct
  misc_feature 1..20: note = Description of Artificial Sequence: Synthetic oligonucleotide
  misc_feature 1..20: note = Target: ANGPTL3; (-) strand; PAM type: YTN; PAM sequence: TTT
  source 1..20: mol_type = other DNA
tatctatcttactgttttgt

SEQ ID NO: 10438 - DNA, 20 bp, synthetic construct
  misc_feature 1..20: note = Description of Artificial Sequence: Synthetic oligonucleotide
  misc_feature 1..20: note = Target: ANGPTL3; (-) strand; PAM type: YTN; PAM sequence: TTG
  source 1..20: mol_type = other DNA
aaggaataattttatctatc

SEQ ID NO: 10439 - DNA, 20 bp, synthetic construct
  misc_feature 1..20: note = Description of Artificial Sequence: Synthetic oligonucleotide
  misc_feature 1..20: note = Target: ANGPTL3; (-) strand; PAM type: YTN; PAM sequence: TTT
  source 1..20: mol_type = other DNA
gaaggaataattttatctat

SEQ ID NO: 10440 - DNA, 20 bp, synthetic construct
  misc_feature 1..20: note = Description of Artificial Sequence: Synthetic oligonucleotide
  misc_feature 1..20: note = Target: ANGPTL3; (-) strand; PAM type: YTN; PAM sequence: CTT
  source 1..20: mol_type = other DNA
tgaaggaataattttatcta

SEQ ID NO: 10441 - DNA, 20 bp, synthetic construct
  misc_feature 1..20: note = Description of Artificial Sequence: Synthetic oligonucleotide
  misc_feature 1..20: note = Target: ANGPTL3; (-) strand; PAM type: YTN; PAM sequence: TTA
  source 1..20: mol_type = other DNA
agtgagctttgaaggaataa

SEQ ID NO: 10442 - DNA, 20 bp, synthetic construct
  misc_feature 1..20: note = Description of Artificial Sequence: Synthetic oligonucleotide
  misc_feature 1..20: note = Target: ANGPTL3; (-) strand; PAM type: YTN; PAM sequence: TTG
  source 1..20: mol_type = other DNA
gacagtgtagatccagaggt

SEQ ID NO: 10443 - DNA, 20 bp, synthetic construct
  misc_feature 1..20: note = Description of Artificial Sequence: Synthetic oligonucleotide
  misc_feature 1..20: note = Target: ANGPTL3; (-) strand; PAM type: YTN; PAM sequence: TTT
  source 1..20: mol_type = other DNA
ggacagtgtagatccagagg

SEQ ID NO: 10444 - DNA, 20 bp, synthetic construct
  misc_feature 1..20: note = Description of Artificial Sequence: Synthetic oligonucleotide
  misc_feature 1..20: note = Target: ANGPTL3; (-) strand; PAM type: YTN; PAM sequence: TTT
  source 1..20: mol_type = other DNA
tggacagtgtagatccagag

SEQ ID NO: 10445 - DNA, 20 bp, synthetic construct
  misc_feature 1..20: note = Description of Artificial Sequence: Synthetic oligonucleotide
  misc_feature 1..20: note = Target: ANGPTL3; (-) strand; PAM type: YTN; PAM sequence: TTT
  source 1..20: mol_type = other DNA
ttggacagtgtagatccaga

SEQ ID NO: 10446 - DNA, 20 bp, synthetic construct
  misc_feature 1..20: note = Description of Artificial Sequence: Synthetic oligonucleotide
  misc_feature 1..20: note = Target: ANGPTL3; (-) strand; PAM type: YTN; PAM sequence: CTT
  source 1..20: mol_type = other DNA
tttggacagtgtagatccag

SEQ ID NO: 10447 - DNA, 20 bp, synthetic construct
  misc_feature 1..20: note = Description of Artificial Sequence: Synthetic oligonucleotide
  misc_feature 1..20: note = Target: ANGPTL3; (-) strand; PAM type: YTN; PAM sequence: TTA
  source 1..20: mol_type = other DNA
gaccgtctttttggacagtg

SEQ ID NO: 10448 - DNA, 20 bp, synthetic construct
  misc_feature 1..20: note = Description of Artificial Sequence: Synthetic oligonucleotide
  misc_feature 1..20: note = Target: ANGPTL3; (-) strand; PAM type: YTN; PAM sequence: CTC
  source 1..20: mol_type = other DNA
attagaccgtctttttggac

SEQ ID NO: 10449 - DNA, 20 bp, synthetic construct
  misc_feature 1..20: note = Description of Artificial Sequence: Synthetic oligonucleotide
  misc_feature 1..20: note = Target: ANGPTL3; (-) strand; PAM type: YTN; PAM sequence: TTG
  source 1..20: mol_type = other DNA
tctcattagaccgtcttttt

SEQ ID NO: 10450 - DNA, 20 bp, synthetic construct
  misc_feature 1..20: note = Description of Artificial Sequence: Synthetic oligonucleotide
  misc_feature 1..20: note = Target: ANGPTL3; (-) strand; PAM type: YTN; PAM sequence: CTC
  source 1..20: mol_type = other DNA
aattgtctcattagaccgtc

SEQ ID NO: 10451 - DNA, 20 bp, synthetic construct
  misc_feature 1..20: note = Description of Artificial Sequence: Synthetic oligonucleotide
  misc_feature 1..20: note = Target: ANGPTL3; (-) strand; PAM type: YTN; PAM sequence: CTA
  source 1..20: mol_type = other DNA
tcaagtgctcaattgtctca

SEQ ID NO: 10452 - DNA, 20 bp, synthetic construct
  misc_feature 1..20: note = Description of Artificial Sequence: Synthetic oligonucleotide
  misc_feature 1..20: note = Target: ANGPTL3; (-) strand; PAM type: YTN; PAM sequence: CTC
  source 1..20: mol_type = other DNA
acctatcaagtgctcaattg

SEQ ID NO: 10453 - DNA, 20 bp, synthetic construct
  misc_feature 1..20: note = Description of Artificial Sequence: Synthetic oligonucleotide
  misc_feature 1..20: note = Target: ANGPTL3; (-) strand; PAM type: YTN; PAM sequence: TTA
  source 1..20: mol_type = other DNA
gaaccactcacctatcaagt

SEQ ID NO: 10454 - DNA, 20 bp, synthetic construct
  misc_feature 1..20: note = Description of Artificial Sequence: Synthetic oligonucleotide
  misc_feature 1..20: note = Target: ANGPTL3; (-) strand; PAM type: YTN; PAM sequence: CTC
  source 1..20: mol_type = other DNA
agttagaaccactcacctat

SEQ ID NO: 10455 - DNA, 20 bp, synthetic construct
  misc_feature 1..20: note = Description of Artificial Sequence: Synthetic oligonucleotide
  misc_feature 1..20: note = Target: ANGPTL3; (-) strand; PAM type: YTN; PAM sequence: CTG
  source 1..20: mol_type = other DNA
agaacatatctcagttagaa

SEQ ID NO: 10456 - DNA, 20 bp, synthetic construct
  misc_feature 1..20: note = Description of Artificial Sequence: Synthetic oligonucleotide
  misc_feature 1..20: note = Target: ANGPTL3; (-) strand; PAM type: YTN; PAM sequence: TTA
  source 1..20: mol_type = other DNA
tactgagaacatatctcagt

SEQ ID NO: 10457 - DNA, 20 bp, synthetic construct
  misc_feature 1..20: note = Description of Artificial Sequence: Synthetic oligonucleotide
  misc_feature 1..20: note = Target: ANGPTL3; (-) strand; PAM type: YTN; PAM sequence: TTT
  source 1..20: mol_type = other DNA
atactgagaacatatctcag

SEQ ID NO: 10458 - DNA, 20 bp, synthetic construct
  misc_feature 1..20: note = Description of Artificial Sequence: Synthetic oligonucleotide
  misc_feature 1..20: note = Target: ANGPTL3; (-) strand; PAM type: YTN; PAM sequence: TTT
  source 1..20: mol_type = other DNA
tatactgagaacatatctca

SEQ ID NO: 10459 - DNA, 20 bp, synthetic construct
  misc_feature 1..20: note = Description of Artificial Sequence: Synthetic oligonucleotide
  misc_feature 1..20: note = Target: ANGPTL3; (-) strand; PAM type: YTN; PAM sequence: TTG
  source 1..20: mol_type = other DNA
tatgttttatactgagaaca

SEQ ID NO: 10460 - DNA, 20 bp, synthetic construct
  misc_feature 1..20: note = Description of Artificial Sequence: Synthetic oligonucleotide
  misc_feature 1..20: note = Target: ANGPTL3; (-) strand; PAM type: YTN; PAM sequence: CTA
  source 1..20: mol_type = other DNA
ttgtatgttttatactgaga

SEQ ID NO: 10461 - DNA, 20 bp, synthetic construct
  misc_feature 1..20: note = Description of Artificial Sequence: Synthetic oligonucleotide
  misc_feature 1..20: note = Target: ANGPTL3; (-) strand; PAM type: YTN; PAM sequence: TTG
  source 1..20: mol_type = other DNA
tataggaagatcctattgta

SEQ ID NO: 10462 - DNA, 20 bp, synthetic construct
  misc_feature 1..20: note = Description of Artificial Sequence: Synthetic oligonucleotide
  misc_feature 1..20: note = Target: ANGPTL3; (-) strand; PAM type: YTN; PAM sequence: TTA
  source 1..20: mol_type = other DNA
atgttgtataggaagatcct

SEQ ID NO: 10463 - DNA, 20 bp, synthetic construct
  misc_feature 1..20: note = Description of Artificial Sequence: Synthetic oligonucleotide
  misc_feature 1..20: note = Target: ANGPTL3; (-) strand; PAM type: YTN; PAM sequence: TTA
  source 1..20: mol_type = other DNA
attaatgttgtataggaaga

SEQ ID NO: 10464 - DNA, 20 bp, synthetic construct
  misc_feature 1..20: note = Description of Artificial Sequence: Synthetic oligonucleotide
  misc_feature 1..20: note = Target: ANGPTL3; (-) strand; PAM type: YTN; PAM sequence: TTT
  source 1..20: mol_type = other DNA
aattaatgttgtataggaag

SEQ ID NO: 10465 - DNA, 20 bp, synthetic construct
  misc_feature 1..20: note = Description of Artificial Sequence: Synthetic oligonucleotide
  misc_feature 1..20: note = Target: ANGPTL3; (-) strand; PAM type: YTN; PAM sequence: TTT
  source 1..20: mol_type = other DNA
taattaatgttgtataggaa

SEQ ID NO: 10466 - DNA, 20 bp, synthetic construct
  misc_feature 1..20: note = Description of Artificial Sequence: Synthetic oligonucleotide
  misc_feature 1..20: note = Target: ANGPTL3; (-) strand; PAM type: YTN; PAM sequence: TTT
  source 1..20: mol_type = other DNA
ttaattaatgttgtatagga

SEQ ID NO: 10467 - DNA, 20 bp, synthetic construct
  misc_feature 1..20: note = Description of Artificial Sequence: Synthetic oligonucleotide
  misc_feature 1..20: note = Target: ANGPTL3; (-) strand; PAM type: YTN; PAM sequence: TTT
  source 1..20: mol_type = other DNA
tttaattaatgttgtatagg

SEQ ID NO: 10468 - DNA, 20 bp, synthetic construct
  misc_feature 1..20: note = Description of Artificial Sequence: Synthetic oligonucleotide
  misc_feature 1..20: note = Target: ANGPTL3; (-) strand; PAM type: YTN; PAM sequence: TTG
  source 1..20: mol_type = other DNA
ttttttaattaatgttgtat

SEQ ID NO: 10469 - DNA, 20 bp, synthetic construct
  misc_feature 1..20: note = Description of Artificial Sequence: Synthetic oligonucleotide
  misc_feature 1..20: note = Target: ANGPTL3; (-) strand; PAM type: YTN; PAM sequence: TTT
  source 1..20: mol_type = other DNA
gttttttaattaatgttgta

SEQ ID NO: 10470 - DNA, 20 bp, synthetic construct
  misc_feature 1..20: note = Description of Artificial Sequence: Synthetic oligonucleotide
  misc_feature 1..20: note = Target: ANGPTL3; (-) strand; PAM type: YTN; PAM sequence: CTA
  source 1..20: mol_type = other DNA
caatagtttgttttttaatt

SEQ ID NO: 10471 - DNA, 20 bp, synthetic construct
  misc_feature 1..20: note = Description of Artificial Sequence: Synthetic oligonucleotide
  misc_feature 1..20: note = Target: ANGPTL3; (-) strand; PAM type: YTN; PAM sequence: TTA
  source 1..20: mol_type = other DNA
actacaatagtttgtttttt

SEQ ID NO: 10472 - DNA, 20 bp, synthetic construct
  misc_feature 1..20: note = Description of Artificial Sequence: Synthetic oligonucleotide
  misc_feature 1..20: note = Target: ANGPTL3; (-) strand; PAM type: YTN; PAM sequence: TTT
  source 1..20: mol_type = other DNA
aactacaatagtttgttttt

SEQ ID NO: 10473 - DNA, 20 bp, synthetic construct
  misc_feature 1..20: note = Description of Artificial Sequence: Synthetic oligonucleotide
  misc_feature 1..20: note = Target: ANGPTL3; (-) strand; PAM type: YTN; PAM sequence: TTT
  source 1..20: mol_type = other DNA
taactacaatagtttgtttt

SEQ ID NO: 10474 - DNA, 20 bp, synthetic construct
  misc_feature 1..20: note = Description of Artificial Sequence: Synthetic oligonucleotide
  misc_feature 1..20: note = Target: ANGPTL3; (-) strand; PAM type: YTN; PAM sequence: TTT
  source 1..20: mol_type = other DNA
ttaactacaatagtttgttt

SEQ ID NO: 10475 - DNA, 20 bp, synthetic construct
  misc_feature 1..20: note = Description of Artificial Sequence: Synthetic oligonucleotide
  misc_feature 1..20: note = Target: ANGPTL3; (-) strand; PAM type: YTN; PAM sequence: CTT
  source 1..20: mol_type = other DNA
tttaactacaatagtttgtt

SEQ ID NO: 10476 - DNA, 20 bp, synthetic construct
  misc_feature 1..20: note = Description of Artificial Sequence: Synthetic oligonucleotide
  misc_feature 1..20: note = Target: ANGPTL3; (-) strand; PAM type: YTN; PAM sequence: TTC
  source 1..20: mol_type = other DNA
ctttttaactacaatagttt

SEQ ID NO: 10477 - DNA, 20 bp, synthetic construct
  misc_feature 1..20: note = Description of Artificial Sequence: Synthetic oligonucleotide
  misc_feature 1..20: note = Target: ANGPTL3; (-) strand; PAM type: YTN; PAM sequence: TTT
  source 1..20: mol_type = other DNA
cctttttaactacaatagtt

SEQ ID NO: 10478 - DNA, 20 bp, synthetic construct
  misc_feature 1..20: note = Description of Artificial Sequence: Synthetic oligonucleotide
  misc_feature 1..20: note = Target: ANGPTL3; (-) strand; PAM type: YTN; PAM sequence: TTT
  source 1..20: mol_type = other DNA
tcctttttaactacaatagt

SEQ ID NO: 10479 - DNA, 20 bp, synthetic construct
  misc_feature 1..20: note = Description of Artificial Sequence: Synthetic oligonucleotide
  misc_feature 1..20: note = Target: ANGPTL3; (-) strand; PAM type: YTN; PAM sequence: TTT
  source 1..20: mol_type = other DNA
ttcctttttaactacaatag

SEQ ID NO: 10480 - DNA, 20 bp, synthetic construct
  misc_feature 1..20: note = Description of Artificial Sequence: Synthetic oligonucleotide
  misc_feature 1..20: note = Target: ANGPTL3; (-) strand; PAM type: YTN; PAM sequence: TTT
  source 1..20: mol_type = other DNA
tttcctttttaactacaata

SEQ ID NO: 10481 - DNA, 20 bp, synthetic construct
  misc_feature 1..20: note = Description of Artificial Sequence: Synthetic oligonucleotide
  misc_feature 1..20: note = Target: ANGPTL3; (-) strand; PAM type: YTN; PAM sequence: CTA
  source 1..20: mol_type = other DNA
attttttcctttttaactac

SEQ ID NO: 10482 - DNA, 20 bp, synthetic construct
  misc_feature 1..20: note = Description of Artificial Sequence: Synthetic oligonucleotide
  misc_feature 1..20: note = Target: ANGPTL3; (-) strand; PAM type: YTN; PAM sequence: CTC
  source 1..20: mol_type = other DNA
taattttttcctttttaact

SEQ ID NO: 10483 - DNA, 20 bp, synthetic construct
  misc_feature 1..20: note = Description of Artificial Sequence: Synthetic oligonucleotide
  misc_feature 1..20: note = Target: ANGPTL3; (-) strand; PAM type: YTN; PAM sequence: TTA
  source 1..20: mol_type = other DNA
catagtatctctaatttttt

SEQ ID NO: 10484 - DNA, 20 bp, synthetic construct
  misc_feature 1..20: note = Description of Artificial Sequence: Synthetic oligonucleotide
  misc_feature 1..20: note = Target: ANGPTL3; (-) strand; PAM type: YTN; PAM sequence: TTT
  source 1..20: mol_type = other DNA
acatagtatctctaattttt

SEQ ID NO: 10485 - DNA, 20 bp, synthetic construct
  misc_feature 1..20: note = Description of Artificial Sequence: Synthetic oligonucleotide
  misc_feature 1..20: note = Target: ANGPTL3; (-) strand; PAM type: YTN; PAM sequence: TTT
  source 1..20: mol_type = other DNA
tacatagtatctctaatttt

SEQ ID NO: 10486 - DNA, 20 bp, synthetic construct
  misc_feature 1..20: note = Description of Artificial Sequence: Synthetic oligonucleotide
  misc_feature 1..20: note = Target: ANGPTL3; (-) strand; PAM type: YTN; PAM sequence: TTT
  source 1..20: mol_type = other DNA
ttacatagtatctctaattt

SEQ ID NO: 10487 - DNA, 20 bp, synthetic construct
  misc_feature 1..20: note = Description of Artificial Sequence: Synthetic oligonucleotide
  misc_feature 1..20: note = Target: ANGPTL3; (-) strand; PAM type: YTN; PAM sequence: TTT
  source 1..20: mol_type = other DNA
tttacatagtatctctaatt

SEQ ID NO: 10488 - DNA, 20 bp, synthetic construct
  misc_feature 1..20: note = Description of Artificial Sequence: Synthetic oligonucleotide
  misc_feature 1..20: note = Target: ANGPTL3; (-) strand; PAM type: YTN; PAM sequence: CTT
  source 1..20: mol_type = other DNA
ttttacatagtatctctaat

SEQ ID NO: 10489 - DNA, 20 bp, synthetic construct
  misc_feature 1..20: note = Description of Artificial Sequence: Synthetic oligonucleotide
  misc_feature 1..20: note = Target: ANGPTL3; (-) strand; PAM type: YTN; PAM sequence: CTC
  source 1..20: mol_type = other DNA
ttttttacatagtatctcta

SEQ ID NO: 10490 - DNA, 20 bp, synthetic construct
  misc_feature 1..20: note = Description of Artificial Sequence: Synthetic oligonucleotide
  misc_feature 1..20: note = Target: ANGPTL3; (-) strand; PAM type: YTN; PAM sequence: TTG
  source 1..20: mol_type = other DNA
gctcttttttacatagtatc

SEQ ID NO: 10491 - DNA, 20 bp, synthetic construct
  misc_feature 1..20: note = Description of Artificial Sequence: Synthetic oligonucleotide
  misc_feature 1..20: note = Target: ANGPTL3; (-) strand; PAM type: YTN; PAM sequence: TTT
  source 1..20: mol_type = other DNA
ggctcttttttacatagtat

SEQ ID NO: 10492 - DNA, 20 bp, synthetic construct
  misc_feature 1..20: note = Description of Artificial Sequence: Synthetic oligonucleotide
  misc_feature 1..20: note = Target: ANGPTL3; (-) strand; PAM type: YTN; PAM sequence: TTT
  source 1..20: mol_type = other DNA
tggctcttttttacatagta

SEQ ID NO: 10493 - DNA, 20 bp, synthetic construct
  misc_feature 1..20: note = Description of Artificial Sequence: Synthetic oligonucleotide
  misc_feature 1..20: note = Target: ANGPTL3; (-) strand; PAM type: YTN; PAM sequence: TTC
  source 1..20: mol_type = other DNA
aaataaaatacaaggtattt

SEQ ID NO: 10494 - DNA, 20 bp, synthetic construct
  misc_feature 1..20: note = Description of Artificial Sequence: Synthetic oligonucleotide
  misc_feature 1..20: note = Target: ANGPTL3; (-) strand; PAM type: YTN; PAM sequence: TTT
  source 1..20: mol_type = other DNA
caaataaaatacaaggtatt

SEQ ID NO: 10495 - DNA, 20 bp, synthetic construct
  misc_feature 1..20: note = Description of Artificial Sequence: Synthetic oligonucleotide
  misc_feature 1..20: note = Target: ANGPTL3; (-) strand; PAM type: YTN; PAM sequence: CTT
  source 1..20: mol_type = other DNA
tcaaataaaatacaaggtat

SEQ ID NO: 10496 - DNA, 20 bp, synthetic construct
  misc_feature 1..20: note = Description of Artificial Sequence: Synthetic oligonucleotide
  misc_feature 1..20: note = Target: ANGPTL3; (-) strand; PAM type: YTN; PAM sequence: TTA
  source 1..20: mol_type = other DNA
tggagatatgtctttcaaat

SEQ ID NO: 10497 - DNA, 20 bp, synthetic construct
  misc_feature 1..20: note = Description of Artificial Sequence: Synthetic oligonucleotide
  misc_feature 1..20: note = Target: ANGPTL3; (-) strand; PAM type: YTN; PAM sequence: CTT
  source 1..20: mol_type = other DNA
atggagatatgtctttcaaa

SEQ ID NO: 10498 - DNA, 20 bp, synthetic construct
  misc_feature 1..20: note = Description of Artificial Sequence: Synthetic oligonucleotide
  misc_feature 1..20: note = Target: ANGPTL3; (-) strand; PAM type: YTN; PAM sequence: TTG
  source 1..20: mol_type = other DNA
tgtaatcttatggagatatg

SEQ ID NO: 10499 - DNA, 20 bp, synthetic construct
  misc_feature 1..20: note = Description of Artificial Sequence: Synthetic oligonucleotide
  misc_feature 1..20: note = Target: ANGPTL3; (-) strand; PAM type: YTN; PAM sequence: CTA
  source 1..20: mol_type = other DNA
cacgaggttgtgtaatctta

SEQ ID NO: 10500 - DNA, 20 bp, synthetic construct
  misc_feature 1..20: note = Description of Artificial Sequence: Synthetic oligonucleotide
  misc_feature 1..20: note = Target: ANGPTL3; (-) strand; PAM type: YTN; PAM sequence: TTA
  source 1..20: mol_type = other DNA
tcctacacgaggttgtgtaa

SEQ ID NO: 10501 - DNA, 20 bp, synthetic construct
  misc_feature 1..20: note = Description of Artificial Sequence: Synthetic oligonucleotide
  misc_feature 1..20: note = Target: ANGPTL3; (-) strand; PAM type: YTN; PAM sequence: TTT
  source 1..20: mol_type = other DNA
atcctacacgaggttgtgta

SEQ ID NO: 10502 - DNA, 20 bp, synthetic construct
  misc_feature 1..20: note = Description of Artificial Sequence: Synthetic oligonucleotide
  misc_feature 1..20: note = Target: ANGPTL3; (-) strand; PAM type: YTN; PAM sequence: CTT
  source 1..20: mol_type = other DNA
tatcctacacgaggttgtgt

SEQ ID NO: 10503 - DNA, 20 bp, synthetic construct
  misc_feature 1..20: note = Description of Artificial Sequence: Synthetic oligonucleotide
  misc_feature 1..20: note = Target: ANGPTL3; (-) strand; PAM type: YTN; PAM sequence: TTC
  source 1..20: mol_type = other DNA
caagcaaagcaaagtccttt

SEQ ID NO: 10504 - DNA, 20 bp, synthetic construct
  misc_feature 1..20: note = Description of Artificial Sequence: Synthetic oligonucleotide
  misc_feature 1..20: note = Target: ANGPTL3; (-) strand; PAM type: YTN; PAM sequence: TTA
  source 1..20: mol_type = other DNA
aattccaagcaaagcaaagt

SEQ ID NO: 10505 - DNA, 20 bp, synthetic construct
  misc_feature 1..20: note = Description of Artificial Sequence: Synthetic oligonucleotide
  misc_feature 1..20: note = Target: ANGPTL3; (-) strand; PAM type: YTN; PAM sequence: TTT
  source 1..20: mol_type = other DNA
aaattccaagcaaagcaaag

SEQ ID NO: 10506 - DNA, 20 bp, synthetic construct
  misc_feature 1..20: note = Description of Artificial Sequence: Synthetic oligonucleotide
  misc_feature 1..20: note = Target: ANGPTL3; (-) strand; PAM type: YTN; PAM sequence: TTG
  source 1..20: mol_type = other DNA
tttaaattccaagcaaagca

SEQ ID NO: 10507 - DNA, 20 bp, synthetic construct
  misc_feature 1..20: note = Description of Artificial Sequence: Synthetic oligonucleotide
  misc_feature 1..20: note = Target: ANGPTL3; (-) strand; PAM type: YTN; PAM sequence: CTA
  source 1..20: mol_type = other DNA
aattgtttaaattccaagca

SEQ ID NO: 10508 - DNA, 20 bp, synthetic construct
  misc_feature 1..20: note = Description of Artificial Sequence: Synthetic oligonucleotide
  misc_feature 1..20: note = Target: ANGPTL3; (-) strand; PAM type: YTN; PAM sequence: TTA
  source 1..20: mol_type = other DNA
agagcctaaattgtttaaat

SEQ ID NO: 10509 - DNA, 20 bp, synthetic construct
  misc_feature 1..20: note = Description of Artificial Sequence: Synthetic oligonucleotide
  misc_feature 1..20: note = Target: ANGPTL3; (-) strand; PAM type: YTN; PAM sequence: TTT
  source 1..20: mol_type = other DNA
aagagcctaaattgtttaaa

SEQ ID NO: 10510 - DNA, 20 bp, synthetic construct
  misc_feature 1..20: note = Description of Artificial Sequence: Synthetic oligonucleotide
  misc_feature 1..20: note = Target: ANGPTL3; (-) strand; PAM type: YTN; PAM sequence: TTA
  source 1..20: mol_type = other DNA
ggacatttaagagcctaaat

SEQ ID NO: 10511 - DNA, 20 bp, synthetic construct
  misc_feature 1..20: note = Description of Artificial Sequence: Synthetic oligonucleotide
  misc_feature 1..20: note = Target: ANGPTL3; (-) strand; PAM type: YTN; PAM sequence: TTT
  source 1..20: mol_type = other DNA
aggacatttaagagcctaaa

SEQ ID NO: 10512 - DNA, 20 bp, synthetic construct
  misc_feature 1..20: note = Description of Artificial Sequence: Synthetic oligonucleotide
  misc_feature 1..20: note = Target: ANGPTL3; (-) strand; PAM type: YTN; PAM sequence: TTT
  source 1..20: mol_type = other DNA
taggacatttaagagcctaa

SEQ ID NO: 10513 - DNA, 20 bp, synthetic construct
  misc_feature 1..20: note = Description of Artificial Sequence: Synthetic oligonucleotide
  misc_feature 1..20: note = Target: ANGPTL3; (-) strand; PAM type: YTN; PAM sequence: CTA
  source 1..20: mol_type = other DNA
cagagaattttaggacattt

SEQ ID NO: 10514 - DNA, 20 bp, synthetic construct
  misc_feature 1..20: note = Description of Artificial Sequence: Synthetic oligonucleotide
  misc_feature 1..20: note = Target: ANGPTL3; (-) strand; PAM type: YTN; PAM sequence: TTA
  source 1..20: mol_type = other DNA
gctacagagaattttaggac

SEQ ID NO: 10515 - DNA, 20 bp, synthetic construct
  misc_feature 1..20: note = Description of Artificial Sequence: Synthetic oligonucleotide
  misc_feature 1..20: note = Target: ANGPTL3; (-) strand; PAM type: YTN; PAM sequence: CTT
  source 1..20: mol_type = other DNA
agctacagagaattttagga

SEQ ID NO: 10516 - DNA, 20 bp, synthetic construct
  misc_feature 1..20: note = Description of Artificial Sequence: Synthetic oligonucleotide
  misc_feature 1..20: note = Target: ANGPTL3; (-) strand; PAM type: YTN; PAM sequence: TTC
  source 1..20: mol_type = other DNA
ttagctacagagaattttag

SEQ ID NO: 10517 - DNA, 20 bp, synthetic construct
  misc_feature 1..20: note = Description of Artificial Sequence: Synthetic oligonucleotide
  misc_feature 1..20: note = Target: ANGPTL3; (-) strand; PAM type: YTN; PAM sequence: TTT
  source 1..20: mol_type = other DNA
cttagctacagagaatttta

SEQ ID NO: 10518 - DNA, 20 bp, synthetic construct
  misc_feature 1..20: note = Description of Artificial Sequence: Synthetic oligonucleotide
  misc_feature 1..20: note = Target: ANGPTL3; (-) strand; PAM type: YTN; PAM sequence: CTA
  source 1..20: mol_type = other DNA
ggaaccaatataaaaatttc

SEQ ID NO: 10519 - DNA, 20 bp, synthetic construct
  misc_feature 1..20: note = Description of Artificial Sequence: Synthetic oligonucleotide
  misc_feature 1..20: note = Target: ANGPTL3; (-) strand; PAM type: YTN; PAM sequence: TTC
  source 1..20: mol_type = other DNA
ctaggaaccaatataaaaat

SEQ ID NO: 10520 - DNA, 20 bp, synthetic construct
  misc_feature 1..20: note = Description of Artificial Sequence: Synthetic oligonucleotide
  misc_feature 1..20: note = Target: ANGPTL3; (-) strand; PAM type: YTN; PAM sequence: CTA
  source 1..20: mol_type = other DNA
gttcctaggaaccaatataa

SEQ ID NO: 10521 - DNA, 20 bp, synthetic construct
  misc_feature 1..20: note = Description of Artificial Sequence: Synthetic oligonucleotide
  misc_feature 1..20: note = Target: ANGPTL3; (-) strand; PAM type: YTN; PAM sequence: TTC
  source 1..20: mol_type = other DNA
ctagttcctaggaaccaata

SEQ ID NO: 10522 - DNA, 20 bp, synthetic construct
  misc_feature 1..20: note = Description of Artificial Sequence: Synthetic oligonucleotide
  misc_feature 1..20: note = Target: ANGPTL3; (-) strand; PAM type: YTN; PAM sequence: TTA
  source 1..20: mol_type = other DNA
aggattcctagttcctagga

SEQ ID NO: 10523 - DNA, 20 bp, synthetic construct
  misc_feature 1..20: note = Description of Artificial Sequence: Synthetic oligonucleotide
  misc_feature 1..20: note = Target: ANGPTL3; (-) strand; PAM type: YTN; PAM sequence: TTT
  source 1..20: mol_type = other DNA
aaggattcctagttcctagg

SEQ ID NO: 10524 - DNA, 20 bp, synthetic construct
  misc_feature 1..20: note = Description of Artificial Sequence: Synthetic oligonucleotide
  misc_feature 1..20: note = Target: ANGPTL3; (-) strand; PAM type: YTN; PAM sequence: CTA
  source 1..20: mol_type = other DNA
atttaaggattcctagttcc

SEQ ID NO: 10525 - DNA, 20 bp, synthetic construct
  misc_feature 1..20: note = Description of Artificial Sequence: Synthetic oligonucleotide
  misc_feature 1..20: note = Target: ANGPTL3; (-) strand; PAM type: YTN; PAM sequence: TTG
  source 1..20: mol_type = other DNA
taagcaaatgtagggcctaa

SEQ ID NO: 10526 - DNA, 20 bp, synthetic construct
  misc_feature 1..20: note = Description of Artificial Sequence: Synthetic oligonucleotide
  misc_feature 1..20: note = Target: ANGPTL3; (-) strand; PAM type: YTN; PAM sequence: CTT
  source 1..20: mol_type = other DNA
gtaagcaaatgtagggccta

SEQ ID NO: 10527 - DNA, 20 bp, synthetic construct
  misc_feature 1..20: note = Description of Artificial Sequence: Synthetic oligonucleotide
  misc_feature 1..20: note = Target: ANGPTL3; (-) strand; PAM type: YTN; PAM sequence: TTA
  source 1..20: mol_type = other DNA
tgccaaggaaaataaacttg

SEQ ID NO: 10528 - DNA, 20 bp, synthetic construct
  misc_feature 1..20: note = Description of Artificial Sequence: Synthetic oligonucleotide
  misc_feature 1..20: note = Target: ANGPTL3; (-) strand; PAM type: YTN; PAM sequence: TTT
  source 1..20: mol_type = other DNA
atgccaaggaaaataaactt

SEQ ID NO: 10529 - DNA, 20 bp, synthetic construct
  misc_feature 1..20: note = Description of Artificial Sequence: Synthetic oligonucleotide
  misc_feature 1..20: note = Target: ANGPTL3; (-) strand; PAM type: YTN; PAM sequence: TTT
  source 1..20: mol_type = other DNA
tatgccaaggaaaataaact

SEQ ID NO: 10530 - DNA, 20 bp, synthetic construct
  misc_feature 1..20: note = Description of Artificial Sequence: Synthetic oligonucleotide
  misc_feature 1..20: note = Target: ANGPTL3; (-) strand; PAM type: YTN; PAM sequence: CTA
  source 1..20: mol_type = other DNA
aaaaattttatgccaaggaa

SEQ ID NO: 10531 - DNA, 20 bp, synthetic construct
  misc_feature 1..20: note = Description of Artificial Sequence: Synthetic oligonucleotide
  misc_feature 1..20: note = Target: ANGPTL3; (-) strand; PAM type: YTN; PAM sequence: CTG
  source 1..20: mol_type = other DNA
atcaaatataaccagtaatg

SEQ ID NO: 10532 - DNA, 20 bp, synthetic construct
  misc_feature 1..20: note = Description of Artificial Sequence: Synthetic oligonucleotide
  misc_feature 1..20: note = Target: ANGPTL3; (-) strand; PAM type: YTN; PAM sequence: TTA
  source 1..20: mol_type = other DNA
aatagaaccctgatcaaata

SEQ ID NO: 10533 - DNA, 20 bp, synthetic construct
  misc_feature 1..20: note = Description of Artificial Sequence: Synthetic oligonucleotide
  misc_feature 1..20: note = Target: ANGPTL3; (-) strand; PAM type: YTN; PAM sequence: TTT
  source 1..20: mol_type = other DNA
aaatagaaccctgatcaaat

SEQ ID NO: 10534 - DNA, 20 bp, synthetic construct
  misc_feature 1..20: note = Description of Artificial Sequence: Synthetic oligonucleotide
  misc_feature 1..20: note = Target: ANGPTL3; (-) strand; PAM type: YTN; PAM sequence: CTA
  source 1..20: mol_type = other DNA
tttaaatagaaccctgatca

SEQ ID NO: 10535 - DNA, 20 bp, synthetic construct
  misc_feature 1..20: note = Description of Artificial Sequence: Synthetic oligonucleotide
  misc_feature 1..20: note = Target: ANGPTL3; (-) strand; PAM type: YTN; PAM sequence: TTG
  source 1..20: mol_type = other DNA
tgcctatttaaatagaaccc

SEQ ID NO: 10536 - DNA, 20 bp, synthetic construct
  misc_feature 1..20: note = Description of Artificial Sequence: Synthetic oligonucleotide
  misc_feature 1..20: note = Target: ANGPTL3; (-) strand; PAM type: YTN; PAM sequence: CTT
  source 1..20: mol_type = other DNA
gtgcctatttaaatagaacc

SEQ ID NO: 10537 - DNA, 20 bp, synthetic construct
  misc_feature 1..20: note = Description of Artificial Sequence: Synthetic oligonucleotide
  misc_feature 1..20: note = Target: ANGPTL3; (-) strand; PAM type: YTN; PAM sequence: TTG
  source 1..20: mol_type = other DNA
aacttgtgcctatttaaata

SEQ ID NO: 10538 - DNA, 20 bp, synthetic construct
  misc_feature 1..20: note = Description of Artificial Sequence: Synthetic oligonucleotide
  misc_feature 1..20: note = Target: ANGPTL3; (-) strand; PAM type: YTN; PAM sequence: CTT
  source 1..20: mol_type = other DNA
gaacttgtgcctatttaaat

SEQ ID NO: 10539 - DNA, 20 bp, synthetic construct
  misc_feature 1..20: note = Description of Artificial Sequence: Synthetic oligonucleotide
  misc_feature 1..20: note = Target: ANGPTL3; (-) strand; PAM type: YTN; PAM sequence: TTG
  source 1..20: mol_type = other DNA
cttgaacttgtgcctattta

SEQ ID NO: 10540 - DNA, 20 bp, synthetic construct
  misc_feature 1..20: note = Description of Artificial Sequence: Synthetic oligonucleotide
  misc_feature 1..20: note = Target: ANGPTL3; (-) strand; PAM type: YTN; PAM sequence: TTT
  source 1..20: mol_type = other DNA
gcttgaacttgtgcctattt

SEQ ID NO: 10541 - DNA, 20 bp, synthetic construct
  misc_feature 1..20: note = Description of Artificial Sequence: Synthetic oligonucleotide
  misc_feature 1..20: note = Target: ANGPTL3; (-) strand; PAM type: YTN; PAM sequence: CTT
  source 1..20: mol_type = other DNA
tgcttgaacttgtgcctatt

SEQ ID NO: 10542 - DNA, 20 bp, synthetic construct
  misc_feature 1..20: note = Description of Artificial Sequence: Synthetic oligonucleotide
  misc_feature 1..20: note = Target: ANGPTL3; (-) strand; PAM type: YTN; PAM sequence: CTG
  source 1..20: mol_type = other DNA
atctttgcttgaacttgtgc

SEQ ID NO: 10543 - DNA, 20 bp, synthetic construct
  misc_feature 1..20: note = Description of Artificial Sequence: Synthetic oligonucleotide
  misc_feature 1..20: note = Target: ANGPTL3; (-) strand; PAM type: YTN; PAM sequence: CTA
  source 1..20: mol_type = other DNA
aaagcagaatctgatctttg

SEQ ID NO: 10544 - DNA, 20 bp, synthetic construct
  misc_feature 1..20: note = Description of Artificial Sequence: Synthetic oligonucleotide
  misc_feature 1..20: note = Target: ANGPTL3; (-) strand; PAM type: YTN; PAM sequence: CTG
  source 1..20: mol_type = other DNA
ctaaaagcagaatctgatct

SEQ ID NO: 10545 - DNA, 20 bp, synthetic construct
  misc_feature 1..20: note = Description of Artificial Sequence: Synthetic oligonucleotide
  misc_feature 1..20: note = Target: ANGPTL3; (-) strand; PAM type: YTN; PAM sequence: CTG
  source 1..20: mol_type = other DNA
agtacacactgctaaaagca

SEQ ID NO: 10546 - DNA, 20 bp, synthetic construct
  misc_feature 1..20: note = Description of Artificial Sequence: Synthetic oligonucleotide
  misc_feature 1..20: note = Target: ANGPTL3; (-) strand; PAM type: YTN; PAM sequence: CTG
  source 1..20: mol_type = other DNA
tctgagtacacactgctaaa

SEQ ID NO: 10547 - DNA, 20 bp, synthetic construct
  misc_feature 1..20: note = Description of Artificial Sequence: Synthetic oligonucleotide
  misc_feature 1..20: note = Target: ANGPTL3; (-) strand; PAM type: YTN; PAM sequence: TTC
  source 1..20: mol_type = other DNA
ctgtctgagtacacactgct

SEQ ID NO: 10548 - DNA, 20 bp, synthetic construct
  misc_feature 1..20: note = Description of Artificial Sequence: Synthetic oligonucleotide
  misc_feature 1..20: note = Target: ANGPTL3; (-) strand; PAM type: YTN; PAM sequence: CTT
  source 1..20: mol_type = other DNA
cctgtctgagtacacactgc

SEQ ID NO: 10549 - DNA, 20 bp, synthetic construct
  misc_feature 1..20: note = Description of Artificial Sequence: Synthetic oligonucleotide
  misc_feature 1..20: note = Target: ANGPTL3; (-) strand; PAM type: YTN; PAM sequence: TTA
  source 1..20: mol_type = other DNA
atacttcctgtctgagtaca

SEQ ID NO: 10550 - DNA, 20 bp, synthetic construct
  misc_feature 1..20: note = Description of Artificial Sequence: Synthetic oligonucleotide
  misc_feature 1..20: note = Target: ANGPTL3; (-) strand; PAM type: YTN; PAM sequence: TTT
  source 1..20: mol_type = other DNA
aatacttcctgtctgagtac

SEQ ID NO: 10551 - DNA, 20 bp, synthetic construct
  misc_feature 1..20: note = Description of Artificial Sequence: Synthetic oligonucleotide
  misc_feature 1..20: note = Target: ANGPTL3; (-) strand; PAM type: YTN; PAM sequence: TTT
  source 1..20: mol_type = other DNA
taatacttcctgtctgagta

SEQ ID NO: 10552 - DNA, 20 bp, synthetic construct
  misc_feature 1..20: note = Description of Artificial Sequence: Synthetic oligonucleotide
  misc_feature 1..20: note = Target: ANGPTL3; (-) strand; PAM type: YTN; PAM sequence: CTT
  source 1..20: mol_type = other DNA
ttaatacttcctgtctgagt

SEQ ID NO: 10553 - DNA, 20 bp, synthetic construct
  misc_feature 1..20: note = Description of Artificial Sequence: Synthetic oligonucleotide
  misc_feature 1..20: note = Target: ANGPTL3; (-) strand; PAM type: YTN; PAM sequence: CTG
  source 1..20: mol_type = other DNA
ccttttaatacttcctgtct

SEQ ID NO: 10554 - DNA, 20 bp, synthetic construct
  misc_feature 1..20: note = Description of Artificial Sequence: Synthetic oligonucleotide
  misc_feature 1..20: note = Target: ANGPTL3; (-) strand; PAM type: YTN; PAM sequence: CTG
  source 1..20: mol_type = other DNA
cctgccttttaatacttcct

SEQ ID NO: 10555 - DNA, 20 bp, synthetic construct
  misc_feature 1..20: note = Description of Artificial Sequence: Synthetic oligonucleotide
  misc_feature 1..20: note = Target: ANGPTL3; (-) strand; PAM type: YTN; PAM sequence: TTC
  source 1..20: mol_type = other DNA
tgcctgccttttaatacttc

SEQ ID NO: 10556 - DNA, 20 bp, synthetic construct
  misc_feature 1..20: note = Description of Artificial Sequence: Synthetic oligonucleotide
  misc_feature 1..20: note = Target: ANGPTL3; (-) strand; PAM type: YTN; PAM sequence: TTT
  source 1..20: mol_type = other DNA
ctgcctgccttttaatactt

SEQ ID NO: 10557 - DNA, 20 bp, synthetic construct
  misc_feature 1..20: note = Description of Artificial Sequence: Synthetic oligonucleotide
  misc_feature 1..20: note = Target: ANGPTL3; (-) strand; PAM type: YTN; PAM sequence: TTT
  source 1..20: mol_type = other DNA
tctgcctgccttttaatact

SEQ ID NO: 10558 - DNA, 20 bp, synthetic construct
  misc_feature 1..20: note = Description of Artificial Sequence: Synthetic oligonucleotide
  misc_feature 1..20: note = Target: ANGPTL3; (-) strand; PAM type: YTN; PAM sequence: TTA
  source 1..20: mol_type = other DNA
taaaggattttctgcctgcc

SEQ ID NO: 10559 - DNA, 20 bp, synthetic construct
  misc_feature 1..20: note = Description of Artificial Sequence: Synthetic oligonucleotide
  misc_feature 1..20: note = Target: ANGPTL3; (-) strand; PAM type: YTN; PAM sequence: TTT
  source 1..20: mol_type = other DNA
ataaaggattttctgcctgc

SEQ ID NO: 10560 - DNA, 20 bp, synthetic construct
  misc_feature 1..20: note = Description of Artificial Sequence: Synthetic oligonucleotide
  misc_feature 1..20: note = Target: ANGPTL3; (-) strand; PAM type: YTN; PAM sequence: TTT
  source 1..20: mol_type = other DNA
tataaaggattttctgcctg

SEQ ID NO: 10561 - DNA, 20 bp, synthetic construct
  misc_feature 1..20: note = Description of Artificial Sequence: Synthetic oligonucleotide
  misc_feature 1..20: note = Target: ANGPTL3; (-) strand; PAM type: YTN; PAM sequence: TTG
  source 1..20: mol_type = other DNA
aaagtagtaattttataaag

SEQ ID NO: 10562 - DNA, 20 bp, synthetic construct
  misc_feature 1..20: note = Description of Artificial Sequence: Synthetic oligonucleotide
  misc_feature 1..20: note = Target: ANGPTL3; (-) strand; PAM type: YTN; PAM sequence: TTC
  source 1..20: mol_type = other DNA
aacgtgggaaaatgcattga

SEQ ID NO: 10563 - DNA, 20 bp, synthetic construct
  misc_feature 1..20: note = Description of Artificial Sequence: Synthetic oligonucleotide
  misc_feature 1..20: note = Target: ANGPTL3; (-) strand; PAM type: YTN; PAM sequence: TTT
  source 1..20: mol_type = other DNA
caacgtgggaaaatgcattg

SEQ ID NO: 10564 - DNA, 20 bp, synthetic construct
  misc_feature 1..20: note = Description of Artificial Sequence: Synthetic oligonucleotide
  misc_feature 1..20: note = Target: ANGPTL3; (-) strand; PAM type: YTN; PAM sequence: CTG
  source 1..20: mol_type = other DNA
cagaagcatttcaacgtggg

SEQ ID NO: 10565 - DNA, 20 bp, synthetic construct
  misc_feature 1..20: note = Description of Artificial Sequence: Synthetic oligonucleotide
  misc_feature 1..20: note = Target: ANGPTL3; (-) strand; PAM type: YTN; PAM sequence: TTA
  source 1..20: mol_type = other DNA
taaactgcagaagcatttca

SEQ ID NO: 10566 - DNA, 20 bp, synthetic construct
  misc_feature 1..20: note = Description of Artificial Sequence: Synthetic oligonucleotide
  misc_feature 1..20: note = Target: ANGPTL3; (-) strand; PAM type: YTN; PAM sequence: CTA
  source 1..20: mol_type = other DNA
attataaactgcagaagcat

SEQ ID NO: 10567 - DNA, 20 bp, synthetic construct
  misc_feature 1..20: note = Description of Artificial Sequence: Synthetic oligonucleotide
  misc_feature 1..20: note = Target: ANGPTL3; (-) strand; PAM type: YTN; PAM sequence: TTG
  source 1..20: mol_type = other DNA
cctaattataaactgcagaa

SEQ ID NO: 10568 - DNA, 20 bp, synthetic construct
  misc_feature 1..20: note = Description of Artificial Sequence: Synthetic oligonucleotide
  misc_feature 1..20: note = Target: ANGPTL3; (-) strand; PAM type: YTN; PAM sequence: TTT
  source 1..20: mol_type = other DNA
gcctaattataaactgcaga

SEQ ID NO: 10569 - DNA, 20 bp, synthetic construct
  misc_feature 1..20: note = Description of Artificial Sequence: Synthetic oligonucleotide
  misc_feature 1..20: note = Target: ANGPTL3; (-) strand; PAM type: YTN; PAM sequence: TTA
  source 1..20: mol_type = other DNA
aagtaatttgcctaattata

SEQ ID NO: 10570 - DNA, 20 bp, synthetic construct
  misc_feature 1..20: note = Description of Artificial Sequence: Synthetic oligonucleotide
  misc_feature 1..20: note = Target: ANGPTL3; (-) strand; PAM type: YTN; PAM sequence: TTA
  source 1..20: mol_type = other DNA
taattaaagtaatttgccta

SEQ ID NO: 10571 - DNA, 20 bp, synthetic construct
  misc_feature 1..20: note = Description of Artificial Sequence: Synthetic oligonucleotide
  misc_feature 1..20: note = Target: ANGPTL3; (-) strand; PAM type: YTN; PAM sequence: TTG
  source 1..20: mol_type = other DNA
attataattaaagtaatttg

SEQ ID NO: 10572 - DNA, 20 bp, synthetic construct
  misc_feature 1..20: note = Description of Artificial Sequence: Synthetic oligonucleotide
  misc_feature 1..20: note = Target: ANGPTL3; (-) strand; PAM type: YTN; PAM sequence: TTA
  source 1..20: mol_type = other DNA
ttgattataattaaagtaat

SEQ ID NO: 10573 - DNA, 20 bp, synthetic construct
  misc_feature 1..20: note = Description of Artificial Sequence: Synthetic oligonucleotide
  misc_feature 1..20: note = Target: ANGPTL3; (-) strand; PAM type: YTN; PAM sequence: TTG
  source 1..20: mol_type = other DNA
aacagcattattgattataa

SEQ ID NO: 10574 - DNA, 20 bp, synthetic construct
  misc_feature 1..20: note = Description of Artificial Sequence: Synthetic oligonucleotide
  misc_feature 1..20: note = Target: ANGPTL3; (-) strand; PAM type: YTN; PAM sequence: TTT
  source 1..20: mol_type = other DNA
gaacagcattattgattata

SEQ ID NO: 10575 - DNA, 20 bp, synthetic construct
  misc_feature 1..20: note = Description of Artificial Sequence: Synthetic oligonucleotide
  misc_feature 1..20: note = Target: ANGPTL3; (-) strand; PAM type: YTN; PAM sequence: TTA
  source 1..20: mol_type = other DNA
tagtaatttgaacagcatta

SEQ ID NO: 10576 - DNA, 20 bp, synthetic construct
  misc_feature 1..20: note = Description of Artificial Sequence: Synthetic oligonucleotide
  misc_feature 1..20: note = Target: ANGPTL3; (-) strand; PAM type: YTN; PAM sequence: CTT
  source 1..20: mol_type = other DNA
atagtaatttgaacagcatt

SEQ ID NO: 10577 - DNA, 20 bp, synthetic construct
  misc_feature 1..20: note = Description of Artificial Sequence: Synthetic oligonucleotide
  misc_feature 1..20: note = Target: ANGPTL3; (-) strand; PAM type: YTN; PAM sequence: TTC
  source 1..20: mol_type = other DNA
ttatagtaatttgaacagca

SEQ ID NO: 10578 - DNA, 20 bp, synthetic construct
  misc_feature 1..20: note = Description of Artificial Sequence: Synthetic oligonucleotide
  misc_feature 1..20: note = Target: ANGPTL3; (-) strand; PAM type: YTN; PAM sequence: CTG
  source 1..20: mol_type = other DNA
tataattcttatagtaattt

SEQ ID NO: 10579 - DNA, 20 bp, synthetic construct
  misc_feature 1..20: note = Description of Artificial Sequence: Synthetic oligonucleotide
  misc_feature 1..20: note = Target: ANGPTL3; (-) strand; PAM type: YTN; PAM sequence: TTG
  source 1..20: mol_type = other DNA
gtataaatatctgtataatt

SEQ ID NO: 10580 - DNA, 20 bp, synthetic construct
  misc_feature 1..20: note = Description of Artificial Sequence: Synthetic oligonucleotide
  misc_feature 1..20: note = Target: ANGPTL3; (-) strand; PAM type: YTN; PAM sequence: CTT
  source 1..20: mol_type = other DNA
ggtataaatatctgtataat

SEQ ID NO: 10581 - DNA, 20 bp, synthetic construct
  misc_feature 1..20: note = Description of Artificial Sequence: Synthetic oligonucleotide
  misc_feature 1..20: note = Target: ANGPTL3; (-) strand; PAM type: YTN; PAM sequence: CTC
  source 1..20: mol_type = other DNA
ttggtataaatatctgtata

SEQ ID NO: 10582 - DNA, 20 bp, synthetic construct
  misc_feature 1..20: note = Description of Artificial Sequence: Synthetic oligonucleotide
  misc_feature 1..20: note = Target: ANGPTL3; (-) strand; PAM type: YTN; PAM sequence: TTG
  source 1..20: mol_type = other DNA
tctcttggtataaatatctg

SEQ ID NO: 10583 - DNA, 20 bp, synthetic construct
  misc_feature 1..20: note = Description of Artificial Sequence: Synthetic oligonucleotide
  misc_feature 1..20: note = Target: ANGPTL3; (-) strand; PAM type: YTN; PAM sequence: CTA
  source 1..20: mol_type = other DNA
gtatattgtctcttggtata

SEQ ID NO: 10584 - DNA, 20 bp, synthetic construct
  misc_feature 1..20: note = Description of Artificial Sequence: Synthetic oligonucleotide
  misc_feature 1..20: note = Target: ANGPTL3; (-) strand; PAM type: YTN; PAM sequence: TTC
  source 1..20: mol_type = other DNA
tagtatattgtctcttggta

SEQ ID NO: 10585 - DNA, 20 bp, synthetic construct
  misc_feature 1..20: note = Description of Artificial Sequence: Synthetic oligonucleotide
  misc_feature 1..20: note = Target: ANGPTL3; (-) strand; PAM type: YTN; PAM sequence: TTT
  source 1..20: mol_type = other DNA
ctagtatattgtctcttggt

SEQ ID NO: 10586 - DNA, 20 bp, synthetic construct
  misc_feature 1..20: note = Description of Artificial Sequence: Synthetic oligonucleotide
  misc_feature 1..20: note = Target: ANGPTL3; (-) strand; PAM type: YTN; PAM sequence: TTG
  source 1..20: mol_type = other DNA
gtttctagtatattgtctct

SEQ ID NO: 10587 - DNA, 20 bp, synthetic construct
  misc_feature 1..20: note = Description of Artificial Sequence: Synthetic oligonucleotide
  misc_feature 1..20: note = Target: ANGPTL3; (-) strand; PAM type: YTN; PAM sequence: CTT
  source 1..20: mol_type = other DNA
ggtttctagtatattgtctc

SEQ ID NO: 10588 - DNA, 20 bp, synthetic construct
  misc_feature 1..20: note = Description of Artificial Sequence: Synthetic oligonucleotide
  misc_feature 1..20: note = Target: ANGPTL3; (-) strand; PAM type: YTN; PAM sequence: CTG
  source 1..20: mol_type = other DNA
acagagtagaggtaatggtc

SEQ ID NO: 10589 - DNA, 20 bp, synthetic construct
  misc_feature 1..20: note = Description of Artificial Sequence: Synthetic oligonucleotide
  misc_feature 1..20: note = Target: ANGPTL3; (-) strand; PAM type: YTN; PAM sequence: CTC
  source 1..20: mol_type = other DNA
acaaataacactgacagagt

SEQ ID NO: 10590 - DNA, 20 bp, synthetic construct
  misc_feature 1..20: note = Description of Artificial Sequence: Synthetic oligonucleotide
  misc_feature 1..20: note = Target: ANGPTL3; (-) strand; PAM type: YTN; PAM sequence: TTC
  source 1..20: mol_type = other DNA
tcacaaataacactgacaga

SEQ ID NO: 10591 - DNA, 20 bp, synthetic construct
  misc_feature 1..20: note = Description of Artificial Sequence: Synthetic oligonucleotide
  misc_feature 1..20: note = Target: ANGPTL3; (-) strand; PAM type: YTN; PAM sequence: TTT
  source 1..20: mol_type = other DNA
ctcacaaataacactgacag

SEQ ID NO: 10592 - DNA, 20 bp, synthetic construct
  misc_feature 1..20: note = Description of Artificial Sequence: Synthetic oligonucleotide
  misc_feature 1..20: note = Target: ANGPTL3; (-) strand; PAM type: YTN; PAM sequence: TTG
  source 1..20: mol_type = other DNA
tgcaatttctcacaaataac

SEQ ID NO: 10593 - DNA, 20 bp, synthetic construct
  misc_feature 1..20: note = Description of Artificial Sequence: Synthetic oligonucleotide
  misc_feature 1..20: note = Target: ANGPTL3; (-) strand; PAM type: YTN; PAM sequence: TTT
  source 1..20: mol_type = other DNA
gtgcaatttctcacaaataa

SEQ ID NO: 10594 - DNA, 20 bp, synthetic construct
  misc_feature 1..20: note = Description of Artificial Sequence: Synthetic oligonucleotide
  misc_feature 1..20: note = Target: ANGPTL3; (-) strand; PAM type: YTN; PAM sequence: TTG
  source 1..20: mol_type = other DNA
caaaatttgtgcaatttctc

SEQ ID NO: 10595 - DNA, 20 bp, synthetic construct
  misc_feature 1..20: note = Description of Artificial Sequence: Synthetic oligonucleotide
  misc_feature 1..20: note = Target: ANGPTL3; (-) strand; PAM type: YTN; PAM sequence: TTT
  source 1..20: mol_type = other DNA
gcaaaatttgtgcaatttct

SEQ ID NO: 10596 - DNA, 20 bp, synthetic construct
  misc_feature 1..20: note = Description of Artificial Sequence: Synthetic oligonucleotide
  misc_feature 1..20: note = Target: ANGPTL3; (-) strand; PAM type: YTN; PAM sequence: TTT
  source 1..20: mol_type = other DNA
tgcaaaatttgtgcaatttc

SEQ ID NO: 10597 - DNA, 20 bp, synthetic construct
  misc_feature 1..20: note = Description of Artificial Sequence: Synthetic oligonucleotide
  misc_feature 1..20: note = Target: ANGPTL3; (-) strand; PAM type: YTN; PAM sequence: TTT
  source 1..20: mol_type = other DNA
ttgcaaaatttgtgcaattt

SEQ ID NO: 10598 - DNA, 20 bp, synthetic construct
  misc_feature 1..20: note = Description of Artificial Sequence: Synthetic oligonucleotide
  misc_feature 1..20: note = Target: ANGPTL3; (-) strand; PAM type: YTN; PAM sequence: CTT
  source 1..20: mol_type = other DNA
tttgcaaaatttgtgcaatt

SEQ ID NO: 10599 - DNA, 20 bp, synthetic construct
  misc_feature 1..20: note = Description of Artificial Sequence: Synthetic oligonucleotide
  misc_feature 1..20: note = Target: ANGPTL3; (-) strand; PAM type: YTN; PAM sequence: CTA
  source 1..20: mol_type = other DNA
acactttttgcaaaatttgt

SEQ ID NO: 10600 - DNA, 20 bp, synthetic construct
  misc_feature 1..20: note = Description of Artificial Sequence: Synthetic oligonucleotide
  misc_feature 1..20: note = Target: ANGPTL3; (-) strand; PAM type: YTN; PAM sequence: CTG
  source 1..20: mol_type = other DNA
tagtaggatactaacacttt

SEQ ID NO: 10601 - DNA, 20 bp, synthetic construct
  misc_feature 1..20: note = Description of Artificial Sequence: Synthetic oligonucleotide
  misc_feature 1..20: note = Target: ANGPTL3; (-) strand; PAM type: YTN; PAM sequence: CTA
  source 1..20: mol_type = other DNA
ctgtagtaggatactaacac

SEQ ID NO: 10602 - DNA, 20 bp, synthetic construct
  misc_feature 1..20: note = Description of Artificial Sequence: Synthetic oligonucleotide
  misc_feature 1..20: note = Target: ANGPTL3; (-) strand; PAM type: YTN; PAM sequence: TTA
  source 1..20: mol_type = other DNA
tatcctactgtagtaggata

SEQ ID NO: 10603 - DNA, 20 bp, synthetic construct
  misc_feature 1..20: note = Description of Artificial Sequence: Synthetic oligonucleotide
  misc_feature 1..20: note = Target: ANGPTL3; (-) strand; PAM type: YTN; PAM sequence: CTA
  source 1..20: mol_type = other DNA
tattatatcctactgtagta

SEQ ID NO: 10604 - DNA, 20 bp, synthetic construct
  misc_feature 1..20: note = Description of Artificial Sequence: Synthetic oligonucleotide
  misc_feature 1..20: note = Target: ANGPTL3; (-) strand; PAM type: YTN; PAM sequence: TTC
  source 1..20: mol_type = other DNA
tatattatatcctactgtag

SEQ ID NO: 10605 - DNA, 20 bp, synthetic construct
  misc_feature 1..20: note = Description of Artificial Sequence: Synthetic oligonucleotide
  misc_feature 1..20: note = Target: ANGPTL3; (-) strand; PAM type: YTN; PAM sequence: CTT
  source 1..20: mol_type = other DNA
ctatattatatcctactgta

SEQ ID NO: 10606 - DNA, 20 bp, synthetic construct
  misc_feature 1..20: note = Description of Artificial Sequence: Synthetic oligonucleotide
  misc_feature 1..20: note = Target: ANGPTL3; (-) strand; PAM type: YTN; PAM sequence: TTC
  source 1..20: mol_type = other DNA
cttctatattatatcctact

SEQ ID NO: 10607 - DNA, 20 bp, synthetic construct
  misc_feature 1..20: note = Description of Artificial Sequence: Synthetic oligonucleotide
  misc_feature 1..20: note = Target: ANGPTL3; (-) strand; PAM type: YTN; PAM sequence: TTT
  source 1..20: mol_type = other DNA
ccttctatattatatcctac

SEQ ID NO: 10608 - DNA, 20 bp, synthetic construct
  misc_feature 1..20: note = Description of Artificial Sequence: Synthetic oligonucleotide
  misc_feature 1..20: note = Target: ANGPTL3; (-) strand; PAM type: YTN; PAM sequence: TTA
  source 1..20: mol_type = other DNA
tttccttctatattatatcc

SEQ ID NO: 10609 - DNA, 20 bp, synthetic construct
  misc_feature 1..20: note = Description of Artificial Sequence: Synthetic oligonucleotide
  misc_feature 1..20: note = Target: ANGPTL3; (-) strand; PAM type: YTN; PAM sequence: TTA
  source 1..20: mol_type = other DNA
tgaaattatttccttctata

SEQ ID NO: 10610 - DNA, 20 bp, synthetic construct
  misc_feature 1..20: note = Description of Artificial Sequence: Synthetic oligonucleotide
  misc_feature 1..20: note = Target: ANGPTL3; (-) strand; PAM type: YTN; PAM sequence: TTT
  source 1..20: mol_type = other DNA
atgaaattatttccttctat

SEQ ID NO: 10611 - DNA, 20 bp, synthetic construct
  misc_feature 1..20: note = Description of Artificial Sequence: Synthetic oligonucleotide
  misc_feature 1..20: note = Target: ANGPTL3; (-) strand; PAM type: YTN; PAM sequence: CTT
  source 1..20: mol_type = other DNA
tatgaaattatttccttcta

SEQ ID NO: 10612 - DNA, 20 bp, synthetic construct
  misc_feature 1..20: note = Description of Artificial Sequence: Synthetic oligonucleotide
  misc_feature 1..20: note = Target: ANGPTL3; (-) strand; PAM type: YTN; PAM sequence: CTA
  source 1..20: mol_type = other DNA
gtaccaaagacaggctttat

SEQ ID NO: 10613 - DNA, 20 bp, synthetic construct
  misc_feature 1..20: note = Description of Artificial Sequence: Synthetic oligonucleotide
  misc_feature 1..20: note = Target: ANGPTL3; (-) strand; PAM type: YTN; PAM sequence: CTG
  source 1..20: mol_type = other DNA
agcactagtaccaaagacag

SEQ ID NO: 10614 - DNA, 20 bp, synthetic construct
  misc_feature 1..20: note = Description of Artificial Sequence: Synthetic oligonucleotide
  misc_feature 1..20: note = Target: ANGPTL3; (-) strand; PAM type: YTN; PAM sequence: TTA
  source 1..20: mol_type = other DNA
atgaaagtaactgagcacta

SEQ ID NO: 10615 - DNA, 20 bp, synthetic construct
  misc_feature 1..20: note = Description of Artificial Sequence: Synthetic oligonucleotide
  misc_feature 1..20: note = Target: ANGPTL3; (-) strand; PAM type: YTN; PAM sequence: TTA
  source 1..20: mol_type = other DNA
gttaatgaaagtaactgagc

SEQ ID NO: 10616 - DNA, 20 bp, synthetic construct
  misc_feature 1..20: note = Description of Artificial Sequence: Synthetic oligonucleotide
  misc_feature 1..20: note = Target: ANGPTL3; (-) strand; PAM type: YTN; PAM sequence: TTT
  source 1..20: mol_type = other DNA
agttaatgaaagtaactgag

SEQ ID NO: 10617 - DNA, 20 bp, synthetic construct
  misc_feature 1..20: note = Description of Artificial Sequence: Synthetic oligonucleotide
  misc_feature 1..20: note = Target: ANGPTL3; (-) strand; PAM type: YTN; PAM sequence: TTT
  source 1..20: mol_type = other DNA
tagttaatgaaagtaactga

SEQ ID NO: 10618 - DNA, 20 bp, synthetic construct
  misc_feature 1..20: note = Description of Artificial Sequence: Synthetic oligonucleotide
  misc_feature 1..20: note = Target: ANGPTL3; (-) strand; PAM type: YTN; PAM sequence: TTT
  source 1..20: mol_type = other DNA
ttagttaatgaaagtaactg

SEQ ID NO: 10619 - DNA, 20 bp, synthetic construct
  misc_feature 1..20: note = Description of Artificial Sequence: Synthetic oligonucleotide
  misc_feature 1..20: note = Target: ANGPTL3; (-) strand; PAM type: YTN; PAM sequence: TTT
  source 1..20: mol_type = other DNA
tttagttaatgaaagtaact

SEQ ID NO: 10620 - DNA, 20 bp, synthetic construct
  misc_feature 1..20: note = Description of Artificial Sequence: Synthetic oligonucleotide
  misc_feature 1..20: note = Target: ANGPTL3; (-) strand; PAM type: YTN; PAM sequence: CTT
  source 1..20: mol_type = other DNA
ttttagttaatgaaagtaac

SEQ ID NO: 10621 - DNA, 20 bp, synthetic construct
  misc_feature 1..20: note = Description of Artificial Sequence: Synthetic oligonucleotide
  misc_feature 1..20: note = Target: ANGPTL3; (-) strand; PAM type: YTN; PAM sequence: TTG
  source 1..20: mol_type = other DNA
aagagtagccccttttttag

SEQ ID NO: 10622 - DNA, 20 bp, synthetic construct
  misc_feature 1..20: note = Description of Artificial Sequence: Synthetic oligonucleotide
  misc_feature 1..20: note = Target: ANGPTL3; (-) strand; PAM type: YTN; PAM sequence: TTT
  source 1..20: mol_type = other DNA
gaagagtagcccctttttta

SEQ ID NO: 10623 - DNA, 20 bp, synthetic construct
  misc_feature 1..20: note = Description of Artificial Sequence: Synthetic oligonucleotide
  misc_feature 1..20: note = Target: ANGPTL3; (-) strand; PAM type: YTN; PAM sequence: TTA
  source 1..20: mol_type = other DNA
gagaagggaatttgaagagt

SEQ ID NO: 10624 - DNA, 20 bp, synthetic construct
  misc_feature 1..20: note = Description of Artificial Sequence: Synthetic oligonucleotide
  misc_feature 1..20: note = Target: ANGPTL3; (-) strand; PAM type: YTN; PAM sequence: TTT
  source 1..20: mol_type = other DNA
agagaagggaatttgaagag

SEQ ID NO: 10625 - DNA, 20 bp, synthetic construct
  misc_feature 1..20: note = Description of Artificial Sequence: Synthetic oligonucleotide
  misc_feature 1..20: note = Target: ANGPTL3; (-) strand; PAM type: YTN; PAM sequence: TTT
  source 1..20: mol_type = other DNA
tagagaagggaatttgaaga

SEQ ID NO: 10626 - DNA, 20 bp, synthetic construct
  misc_feature 1..20: note = Description of Artificial Sequence: Synthetic oligonucleotide
  misc_feature 1..20: note = Target: ANGPTL3; (-) strand; PAM type: YTN; PAM sequence: TTT
  source 1..20: mol_type = other DNA
ttagagaagggaatttgaag

SEQ ID NO: 10627 - DNA, 20 bp, synthetic construct
  misc_feature 1..20: note = Description of Artificial Sequence: Synthetic oligonucleotide
  misc_feature 1..20: note = Target: ANGPTL3; (-) strand; PAM type: YTN; PAM sequence: CTT
  source 1..20: mol_type = other DNA
tttagagaagggaatttgaa

SEQ ID NO: 10628 - DNA, 20 bp, synthetic construct
  misc_feature 1..20: note = Description of Artificial Sequence: Synthetic oligonucleotide
  misc_feature 1..20: note = Target: ANGPTL3; (-) strand; PAM type: YTN; PAM sequence: TTC
  source 1..20: mol_type = other DNA
tttttagagaagggaatttg

SEQ ID NO: 10629 - DNA, 20 bp, synthetic construct
  misc_feature 1..20: note = Description of Artificial Sequence: Synthetic oligonucleotide
  misc_feature 1..20: note = Target: ANGPTL3; (-) strand; PAM type: YTN; PAM sequence: TTG
  source 1..20: mol_type = other DNA
atatagtacattctttttag

SEQ ID NO: 10630 - DNA, 20 bp, synthetic construct
  misc_feature 1..20: note = Description of Artificial Sequence: Synthetic oligonucleotide
  misc_feature 1..20: note = Target: ANGPTL3; (-) strand; PAM type: YTN; PAM sequence: TTT
  source 1..20: mol_type = other DNA
gatatagtacattcttttta

SEQ ID NO: 10631 - DNA, 20 bp, synthetic construct
  misc_feature 1..20: note = Description of Artificial Sequence: Synthetic oligonucleotide
  misc_feature 1..20: note = Target: ANGPTL3; (-) strand; PAM type: YTN; PAM sequence: TTT
  source 1..20: mol_type = other DNA
tgatatagtacattcttttt

SEQ ID NO: 10632 - DNA, 20 bp, synthetic construct
  misc_feature 1..20: note = Description of Artificial Sequence: Synthetic oligonucleotide
  misc_feature 1..20: note = Target: ANGPTL3; (-) strand; PAM type: YTN; PAM sequence: CTT
  source 1..20: mol_type = other DNA
ttgatatagtacattctttt

SEQ ID NO: 10633 - DNA, 20 bp, synthetic construct
  misc_feature 1..20: note = Description of Artificial Sequence: Synthetic oligonucleotide
  misc_feature 1..20: note = Target: ANGPTL3; (-) strand; PAM type: YTN; PAM sequence: TTA
  source 1..20: mol_type = other DNA
cccccttttgatatagtaca

SEQ ID NO: 10634 - DNA, 20 bp, synthetic construct
  misc_feature 1..20: note = Description of Artificial Sequence: Synthetic oligonucleotide
  misc_feature 1..20: note = Target: ANGPTL3; (-) strand; PAM type: YTN; PAM sequence: TTT
  source 1..20: mol_type = other DNA
acccccttttgatatagtac

SEQ ID NO: 10635 - DNA, 20 bp, synthetic construct
  misc_feature 1..20: note = Description of Artificial Sequence: Synthetic oligonucleotide
  misc_feature 1..20: note = Target: ANGPTL3; (-) strand; PAM type: YTN; PAM sequence: CTA
  source 1..20: mol_type = other DNA
agtgcagaatgtatacgtag

SEQ ID NO: 10636 - DNA, 20 bp, synthetic construct
  misc_feature 1..20: note = Description of Artificial Sequence: Synthetic oligonucleotide
  misc_feature 1..20: note = Target: ANGPTL3; (-) strand; PAM type: YTN; PAM sequence: TTC
  source 1..20: mol_type = other DNA
taagtgcagaatgtatacgt

SEQ ID NO: 10637 - DNA, 20 bp, synthetic construct
  misc_feature 1..20: note = Description of Artificial Sequence: Synthetic oligonucleotide
  misc_feature 1..20: note = Target: ANGPTL3; (-) strand; PAM type: YTN; PAM sequence: TTT
  source 1..20: mol_type = other DNA
ctaagtgcagaatgtatacg

SEQ ID NO: 10638 - DNA, 20 bp, synthetic construct
  misc_feature 1..20: note = Description of Artificial Sequence: Synthetic oligonucleotide
  misc_feature 1..20: note = Target: ANGPTL3; (-) strand; PAM type: YTN; PAM sequence: TTG
  source 1..20: mol_type = other DNA
aataagagaatgataaaatc

SEQ ID NO: 10639 - DNA, 20 bp, synthetic construct
  misc_feature 1..20: note = Description of Artificial Sequence: Synthetic oligonucleotide
  misc_feature 1..20: note = Target: ANGPTL3; (-) strand; PAM type: YTN; PAM sequence: TTA
  source 1..20: mol_type = other DNA
ttgaataagagaatgataaa

SEQ ID NO: 10640 - DNA, 20 bp, synthetic construct
  misc_feature 1..20: note = Description of Artificial Sequence: Synthetic oligonucleotide
  misc_feature 1..20: note = Target: ANGPTL3; (-) strand; PAM type: YTN; PAM sequence: TTT
  source 1..20: mol_type = other DNA
attgaataagagaatgataa

SEQ ID NO: 10641 - DNA, 20 bp, synthetic construct
  misc_feature 1..20: note = Description of Artificial Sequence: Synthetic oligonucleotide
  misc_feature 1..20: note = Target: ANGPTL3; (-) strand; PAM type: YTN; PAM sequence: TTG
  source 1..20: mol_type = other DNA
tagaaacaatatttattgaa

SEQ ID NO: 10642 - DNA, 20 bp, synthetic construct
  misc_feature 1..20: note = Description of Artificial Sequence: Synthetic oligonucleotide
  misc_feature 1..20: note = Target: ANGPTL3; (-) strand; PAM type: YTN; PAM sequence: TTA
  source 1..20: mol_type = other DNA
cacattgtagaaacaatatt

SEQ ID NO: 10643 - DNA, 20 bp, synthetic construct
  misc_feature 1..20: note = Description of Artificial Sequence: Synthetic oligonucleotide
  misc_feature 1..20: note = Target: ANGPTL3; (-) strand; PAM type: YTN; PAM sequence: CTT
  source 1..20: mol_type = other DNA
acacattgtagaaacaatat

SEQ ID NO: 10644 - DNA, 20 bp, synthetic construct
  misc_feature 1..20: note = Description of Artificial Sequence: Synthetic oligonucleotide
  misc_feature 1..20: note = Target: ANGPTL3; (-) strand; PAM type: YTN; PAM sequence: TTA
  source 1..20: mol_type = other DNA
gtacagtaatgccttacaca

SEQ ID NO: 10645 - DNA, 20 bp, synthetic construct
  misc_feature 1..20: note = Description of Artificial Sequence: Synthetic oligonucleotide
  misc_feature 1..20: note = Target: ANGPTL3; (-) strand; PAM type: YTN; PAM sequence: TTT
  source 1..20: mol_type = other DNA
agtacagtaatgccttacac

SEQ ID NO: 10646 - DNA, 20 bp, synthetic construct
  misc_feature 1..20: note = Description of Artificial Sequence: Synthetic oligonucleotide
  misc_feature 1..20: note = Target: ANGPTL3; (-) strand; PAM type: YTN; PAM sequence: CTT
  source 1..20: mol_type = other DNA
tagtacagtaatgccttaca

SEQ ID NO: 10647 - DNA, 20 bp, synthetic construct
  misc_feature 1..20: note = Description of Artificial Sequence: Synthetic oligonucleotide
  misc_feature 1..20: note = Target: ANGPTL3; (-) strand; PAM type: YTN; PAM sequence: TTA
  source 1..20: mol_type = other DNA
taatgctttagtacagtaat

SEQ ID NO: 10648 - DNA, 20 bp, synthetic construct
  misc_feature 1..20: note = Description of Artificial Sequence: Synthetic oligonucleotide
  misc_feature 1..20: note = Target: ANGPTL3; (-) strand; PAM type: YTN; PAM sequence: CTT
  source 1..20: mol_type = other DNA
ataatgctttagtacagtaa

SEQ ID NO: 10649 - DNA, 20 bp, synthetic construct
  misc_feature 1..20: note = Description of Artificial Sequence: Synthetic oligonucleotide
  misc_feature 1..20: note = Target: ANGPTL3; (-) strand; PAM type: YTN; PAM sequence: TTC
  source 1..20: mol_type = other DNA
cttataatgctttagtacag

SEQ ID NO: 10650 - DNA, 20 bp, synthetic construct
  misc_feature 1..20: note = Description of Artificial Sequence: Synthetic oligonucleotide
  misc_feature 1..20: note = Target: ANGPTL3; (-) strand; PAM type: YTN; PAM sequence: TTA
  source 1..20: mol_type = other DNA
tattccttataatgctttag

SEQ ID NO: 10651 - DNA, 20 bp, synthetic construct
  misc_feature 1..20: note = Description of Artificial Sequence: Synthetic oligonucleotide
  misc_feature 1..20: note = Target: ANGPTL3; (-) strand; PAM type: YTN; PAM sequence: CTT
  source 1..20: mol_type = other DNA
atattccttataatgcttta

SEQ ID NO: 10652 - DNA, 20 bp, synthetic construct
  misc_feature 1..20: note = Description of Artificial Sequence: Synthetic oligonucleotide
  misc_feature 1..20: note = Target: ANGPTL3; (-) strand; PAM type: YTN; PAM sequence: TTA
  source 1..20: mol_type = other DNA
acttatattccttataatgc

SEQ ID NO: 10653 - DNA, 20 bp, synthetic construct
  misc_feature 1..20: note = Description of Artificial Sequence: Synthetic oligonucleotide
  misc_feature 1..20: note = Target: ANGPTL3; (-) strand; PAM type: YTN; PAM sequence: TTT
  source 1..20: mol_type = other DNA
aacttatattccttataatg

SEQ ID NO: 10654 - DNA, 20 bp, synthetic construct
  misc_feature 1..20: note = Description of Artificial Sequence: Synthetic oligonucleotide
  misc_feature 1..20: note = Target: ANGPTL3; (-) strand; PAM type: YTN; PAM sequence: TTT
  source 1..20: mol_type = other DNA
taacttatattccttataat

SEQ ID NO: 10655 - DNA, 20 bp, synthetic construct
  misc_feature 1..20: note = Description of Artificial Sequence: Synthetic oligonucleotide
  misc_feature 1..20: note = Target: ANGPTL3; (-) strand; PAM type: YTN; PAM sequence: TTT
  source 1..20: mol_type = other DNA
ttaacttatattccttataa

SEQ ID NO: 10656 - DNA, 20 bp, synthetic construct
  misc_feature 1..20: note = Description of Artificial Sequence: Synthetic oligonucleotide
  misc_feature 1..20: note = Target: ANGPTL3; (-) strand; PAM type: YTN; PAM sequence: TTG
  source 1..20: mol_type = other DNA
tatgtgtttttaacttatat

SEQ ID NO: 10657 - DNA, 20 bp, synthetic construct
  misc_feature 1..20: note = Description of Artificial Sequence: Synthetic oligonucleotide
  misc_feature 1..20: note = Target: ANGPTL3; (-) strand; PAM type: YTN; PAM sequence: TTT
  source 1..20: mol_type = other DNA
gtatgtgtttttaacttata

SEQ ID NO: 10658 - DNA, 20 bp, synthetic construct
  misc_feature 1..20: note = Description of Artificial Sequence: Synthetic oligonucleotide
  misc_feature 1..20: note = Target: ANGPTL3; (-) strand; PAM type: YTN; PAM sequence: TTG
  source 1..20: mol_type = other DNA
gcaagatttgtatgtgtttt

SEQ ID NO: 10659 - DNA, 20 bp, synthetic construct
  misc_feature 1..20: note = Description of Artificial Sequence: Synthetic oligonucleotide
  misc_feature 1..20: note = Target: ANGPTL3; (-) strand; PAM type: YTN; PAM sequence: TTG
  source 1..20: mol_type = other DNA
attggcaagatttgtatgtg

SEQ ID NO: 10660 - DNA, 20 bp, synthetic construct
  misc_feature 1..20: note = Description of Artificial Sequence: Synthetic oligonucleotide
  misc_feature 1..20: note = Target: ANGPTL3; (-) strand; PAM type: YTN; PAM sequence: CTG
  source 1..20: mol_type = other DNA
ttgattggcaagatttgtat

SEQ ID NO: 10661 - DNA, 20 bp, synthetic construct
  misc_feature 1..20: note = Description of Artificial Sequence: Synthetic oligonucleotide
  misc_feature 1..20: note = Target: ANGPTL3; (-) strand; PAM type: YTN; PAM sequence: CTA
  source 1..20: mol_type = other DNA
taagctgttgattggcaaga

SEQ ID NO: 10662 - DNA, 20 bp, synthetic construct
  misc_feature 1..20: note = Description of Artificial Sequence: Synthetic oligonucleotide
  misc_feature 1..20: note = Target: ANGPTL3; (-) strand; PAM type: YTN; PAM sequence: TTA
  source 1..20: mol_type = other DNA
cactataagctgttgattgg

SEQ ID NO: 10663 - DNA, 20 bp, synthetic construct
  misc_feature 1..20: note = Description of Artificial Sequence: Synthetic oligonucleotide
  misc_feature 1..20: note = Target: ANGPTL3; (-) strand; PAM type: YTN; PAM sequence: CTA
  source 1..20: mol_type = other DNA
ttacactataagctgttgat

SEQ ID NO: 10664 - DNA, 20 bp, synthetic construct
  misc_feature 1..20: note = Description of Artificial Sequence: Synthetic oligonucleotide
  misc_feature 1..20: note = Target: ANGPTL3; (-) strand; PAM type: YTN; PAM sequence: CTC
  source 1..20: mol_type = other DNA
ccctattacactataagctg

SEQ ID NO: 10665 - DNA, 20 bp, synthetic construct
  misc_feature 1..20: note = Description of Artificial Sequence: Synthetic oligonucleotide
  misc_feature 1..20: note = Target: ANGPTL3; (-) strand; PAM type: YTN; PAM sequence: CTC
  source 1..20: mol_type = other DNA
tcccctattacactataagc

SEQ ID NO: 10666 - DNA, 20 bp, synthetic construct
  misc_feature 1..20: note = Description of Artificial Sequence: Synthetic oligonucleotide
  misc_feature 1..20: note = Target: ANGPTL3; (-) strand; PAM type: YTN; PAM sequence: TTC
  source 1..20: mol_type = other DNA
tctcccctattacactataa

SEQ ID NO: 10667 - DNA, 20 bp, synthetic construct
  misc_feature 1..20: note = Description of Artificial Sequence: Synthetic oligonucleotide
  misc_feature 1..20: note = Target: ANGPTL3; (-) strand; PAM type: YTN; PAM sequence: CTT
  source 1..20: mol_type = other DNA
ctctcccctattacactata

SEQ ID NO: 10668 - DNA, 20 bp, synthetic construct
  misc_feature 1..20: note = Description of Artificial Sequence: Synthetic oligonucleotide
  misc_feature 1..20: note = Target: ANGPTL3; (-) strand; PAM type: YTN; PAM sequence: TTG
  source 1..20: mol_type = other DNA
agggagaatatagatgggcc

SEQ ID NO: 10669 - DNA, 20 bp, synthetic construct
  misc_feature 1..20: note = Description of Artificial Sequence: Synthetic oligonucleotide
  misc_feature 1..20: note = Target: ANGPTL3; (-) strand; PAM type: YTN; PAM sequence: CTA
  source 1..20: mol_type = other DNA
gttgagggagaatatagatg

SEQ ID NO: 10670 - DNA, 20 bp, synthetic construct
  misc_feature 1..20: note = Description of Artificial Sequence: Synthetic oligonucleotide
  misc_feature 1..20: note = Target: ANGPTL3; (-) strand; PAM type: YTN; PAM sequence: TTG
  source 1..20: mol_type = other DNA
ctagttgagggagaatatag

SEQ ID NO: 10671 - DNA, 20 bp, synthetic construct
  misc_feature 1..20: note = Description of Artificial Sequence: Synthetic oligonucleotide
  misc_feature 1..20: note = Target: ANGPTL3; (-) strand; PAM type: YTN; PAM sequence: CTT
  source 1..20: mol_type = other DNA
gctagttgagggagaatata

SEQ ID NO: 10672 - DNA, 20 bp, synthetic construct
  misc_feature 1..20: note = Description of Artificial Sequence: Synthetic oligonucleotide
  misc_feature 1..20: note = Target: ANGPTL3; (-) strand; PAM type: YTN; PAM sequence: TTC
  source 1..20: mol_type = other DNA
atccacttgctagttgaggg

SEQ ID NO: 10673 - DNA, 20 bp, synthetic construct
  misc_feature 1..20: note = Description of Artificial Sequence: Synthetic oligonucleotide
  misc_feature 1..20: note = Target: ANGPTL3; (-) strand; PAM type: YTN; PAM sequence: TTT
  source 1..20: mol_type = other DNA
catccacttgctagttgagg

SEQ ID NO: 10674 - DNA, 20 bp, synthetic construct
  misc_feature 1..20: note = Description of Artificial Sequence: Synthetic oligonucleotide
  misc_feature 1..20: note = Target: ANGPTL3; (-) strand; PAM type: YTN; PAM sequence: CTG
  source 1..20: mol_type = other DNA
atatttcatccacttgctag

SEQ ID NO: 10675 - DNA, 20 bp, synthetic construct
  misc_feature 1..20: note = Description of Artificial Sequence: Synthetic oligonucleotide
  misc_feature 1..20: note = Target: ANGPTL3; (-) strand; PAM type: YTN; PAM sequence: TTG
  source 1..20: mol_type = other DNA
accctgatatttcatccact

SEQ ID NO: 10676 - DNA, 20 bp, synthetic construct
  misc_feature 1..20: note = Description of Artificial Sequence: Synthetic oligonucleotide
  misc_feature 1..20: note = Target: ANGPTL3; (-) strand; PAM type: YTN; PAM sequence: CTA
  source 1..20: mol_type = other DNA
ttgaccctgatatttcatcc

SEQ ID NO: 10677 - DNA, 20 bp, synthetic construct
  misc_feature 1..20: note = Description of Artificial Sequence: Synthetic oligonucleotide
  misc_feature 1..20: note = Target: ANGPTL3; (-) strand; PAM type: YTN; PAM sequence: TTA
  source 1..20: mol_type = other DNA
taactattgaccctgatatt

SEQ ID NO: 10678 - DNA, 20 bp, synthetic construct
  misc_feature 1..20: note = Description of Artificial Sequence: Synthetic oligonucleotide
  misc_feature 1..20: note = Target: ANGPTL3; (-) strand; PAM type: YTN; PAM sequence: CTT
  source 1..20: mol_type = other DNA
ataactattgaccctgatat

SEQ ID NO: 10679 - DNA, 20 bp, synthetic construct
  misc_feature 1..20: note = Description of Artificial Sequence: Synthetic oligonucleotide
  misc_feature 1..20: note = Target: ANGPTL3; (-) strand; PAM type: YTN; PAM sequence: TTG
  source 1..20: mol_type = other DNA
tggcttataactattgaccc

SEQ ID NO: 10680 - DNA, 20 bp, synthetic construct
  misc_feature 1..20: note = Description of Artificial Sequence: Synthetic oligonucleotide
  misc_feature 1..20: note = Target: ANGPTL3; (-) strand; PAM type: YTN; PAM sequence: TTT
  source 1..20: mol_type = other DNA
gtggcttataactattgacc

SEQ ID NO: 10681 - DNA, 20 bp, synthetic construct
  misc_feature 1..20: note = Description of Artificial Sequence: Synthetic oligonucleotide
  misc_feature 1..20: note = Target: ANGPTL3; (-) strand; PAM type: YTN; PAM sequence: TTT
  source 1..20: mol_type = other DNA
tgtggcttataactattgac

SEQ ID NO: 10682 - DNA, 20 bp, synthetic construct
  misc_feature 1..20: note = Description of Artificial Sequence: Synthetic oligonucleotide
  misc_feature 1..20: note = Target: ANGPTL3; (-) strand; PAM type: YTN; PAM sequence: CTT
  source 1..20: mol_type = other DNA
ttgtggcttataactattga

SEQ ID NO: 10683 - DNA, 20 bp, synthetic construct
  misc_feature 1..20: note = Description of Artificial Sequence: Synthetic oligonucleotide
  misc_feature 1..20: note = Target: ANGPTL3; (-) strand; PAM type: YTN; PAM sequence: CTG
  source 1..20: mol_type = other DNA
tcagcttttgtggcttataa

SEQ ID NO: 10684 - DNA, 20 bp, synthetic construct
  misc_feature 1..20: note = Description of Artificial Sequence: Synthetic oligonucleotide
  misc_feature 1..20: note = Target: ANGPTL3; (-) strand; PAM type: YTN; PAM sequence: TTA
  source 1..20: mol_type = other DNA
agctgtcagcttttgtggct

SEQ ID NO: 10685 - DNA, 20 bp, synthetic construct
  misc_feature 1..20: note = Description of Artificial Sequence: Synthetic oligonucleotide
  misc_feature 1..20: note = Target: ANGPTL3; (-) strand; PAM type: YTN; PAM sequence: TTA
  source 1..20: mol_type = other DNA
attaagctgtcagcttttgt

SEQ ID NO: 10686 - DNA, 20 bp, synthetic construct
  misc_feature 1..20: note = Description of Artificial Sequence: Synthetic oligonucleotide
  misc_feature 1..20: note = Target: ANGPTL3; (-) strand; PAM type: YTN; PAM sequence: CTT
  source 1..20: mol_type = other DNA
aattaagctgtcagcttttg

SEQ ID NO: 10687 - DNA, 20 bp, synthetic construct
  misc_feature 1..20: note = Description of Artificial Sequence: Synthetic oligonucleotide
  misc_feature 1..20: note = Target: ANGPTL3; (-) strand; PAM type: YTN; PAM sequence: CTC
  source 1..20: mol_type = other DNA
ttaattaagctgtcagcttt

SEQ ID NO: 10688 - DNA, 20 bp, synthetic construct
  misc_feature 1..20: note = Description of Artificial Sequence: Synthetic oligonucleotide
  misc_feature 1..20: note = Target: ANGPTL3; (-) strand; PAM type: YTN; PAM sequence: TTC
  source 1..20: mol_type = other DNA
tcttaattaagctgtcagct

SEQ ID NO: 10689 - DNA, 20 bp, synthetic construct
  misc_feature 1..20: note = Description of Artificial Sequence: Synthetic oligonucleotide
  misc_feature 1..20: note = Target: ANGPTL3; (-) strand; PAM type: YTN; PAM sequence: CTT
  source 1..20: mol_type = other DNA
ctcttaattaagctgtcagc

SEQ ID NO: 10690 - DNA, 20 bp, synthetic construct
  misc_feature 1..20: note = Description of Artificial Sequence: Synthetic oligonucleotide
  misc_feature 1..20: note = Target: ANGPTL3; (-) strand; PAM type: YTN; PAM sequence: TTC
  source 1..20: mol_type = other DNA
aaaacttctcttaattaagc

SEQ ID NO: 10691 - DNA, 20 bp, synthetic construct
  misc_feature 1..20: note = Description of Artificial Sequence: Synthetic oligonucleotide
  misc_feature 1..20: note = Target: ANGPTL3; (-) strand; PAM type: YTN; PAM sequence: TTT
  source 1..20: mol_type = other DNA
caaaacttctcttaattaag

SEQ ID NO: 10692 - DNA, 20 bp, synthetic construct
  misc_feature 1..20: note = Description of Artificial Sequence: Synthetic oligonucleotide
  misc_feature 1..20: note = Target: ANGPTL3; (-) strand; PAM type: YTN; PAM sequence: TTG
  source 1..20: mol_type = other DNA
gtcatgaaatacatatttca

SEQ ID NO: 10693 - DNA, 20 bp, synthetic construct
  misc_feature 1..20: note = Description of Artificial Sequence: Synthetic oligonucleotide
  misc_feature 1..20: note = Target: ANGPTL3; (-) strand; PAM type: YTN; PAM sequence: TTA
  source 1..20: mol_type = other DNA
ttggtcatgaaatacatatt

SEQ ID NO: 10694 - DNA, 20 bp, synthetic construct
  misc_feature 1..20: note = Description of Artificial Sequence: Synthetic oligonucleotide
  misc_feature 1..20: note = Target: ANGPTL3; (-) strand; PAM type: YTN; PAM sequence: TTG
  source 1..20: mol_type = other DNA
taattattggtcatgaaata

SEQ ID NO: 10695 - DNA, 20 bp, synthetic construct
  misc_feature 1..20: note = Description of Artificial Sequence: Synthetic oligonucleotide
  misc_feature 1..20: note = Target: ANGPTL3; (-) strand; PAM type: YTN; PAM sequence: TTA
  source 1..20: mol_type = other DNA
cagttgtaattattggtcat

SEQ ID NO: 10696 - DNA, 20 bp, synthetic construct
  misc_feature 1..20: note = Description of Artificial Sequence: Synthetic oligonucleotide
  misc_feature 1..20: note = Target: ANGPTL3; (-) strand; PAM type: YTN; PAM sequence: TTA
  source 1..20: mol_type = other DNA
aatagaaaagttacagttgt

SEQ ID NO: 10697 - DNA, 20 bp, synthetic construct
  misc_feature 1..20: note = Description of Artificial Sequence: Synthetic oligonucleotide
  misc_feature 1..20: note = Target: ANGPTL3; (-) strand; PAM type: YTN; PAM sequence: TTT
  source 1..20: mol_type = other DNA
aaatagaaaagttacagttg

SEQ ID NO: 10698 - DNA, 20 bp, synthetic construct
  misc_feature 1..20: note = Description of Artificial Sequence: Synthetic oligonucleotide
  misc_feature 1..20: note = Target: ANGPTL3; (-) strand; PAM type: YTN; PAM sequence: CTT
  source 1..20: mol_type = other DNA
taaatagaaaagttacagtt

SEQ ID NO: 10699 - DNA, 20 bp, synthetic construct
  misc_feature 1..20: note = Description of Artificial Sequence: Synthetic oligonucleotide
  misc_feature 1..20: note = Target: ANGPTL3; (-) strand; PAM type: YTN; PAM sequence: TTC
  source 1..20: mol_type = other DNA
tttaaatagaaaagttacag

SEQ ID NO: 10700 - DNA, 20 bp, synthetic construct
  misc_feature 1..20: note = Description of Artificial Sequence: Synthetic oligonucleotide
  misc_feature 1..20: note = Target: ANGPTL3; (-) strand; PAM type: YTN; PAM sequence: CTT
  source 1..20: mol_type = other DNA
ctttaaatagaaaagttaca

SEQ ID NO: 10701 - DNA, 20 bp, synthetic construct
  misc_feature 1..20: note = Description of Artificial Sequence: Synthetic oligonucleotide
  misc_feature 1..20: note = Target: ANGPTL3; (-) strand; PAM type: YTN; PAM sequence: CTC
  source 1..20: mol_type = other DNA
cttctttaaatagaaaagtt

SEQ ID NO: 10702 - DNA, 20 bp, synthetic construct
  misc_feature 1..20: note = Description of Artificial Sequence: Synthetic oligonucleotide
  misc_feature 1..20: note = Target: ANGPTL3; (-) strand; PAM type: YTN; PAM sequence: TTC
  source 1..20: mol_type = other DNA
tccttctttaaatagaaaag

SEQ ID NO: 10703 - DNA, 20 bp, synthetic construct
  misc_feature 1..20: note = Description of Artificial Sequence: Synthetic oligonucleotide
  misc_feature 1..20: note = Target: ANGPTL3; (-) strand; PAM type: YTN; PAM sequence: TTT
  source 1..20: mol_type = other DNA
ctccttctttaaatagaaaa

SEQ ID NO: 10704 - DNA, 20 bp, synthetic construct
  misc_feature 1..20: note = Description of Artificial Sequence: Synthetic oligonucleotide
  misc_feature 1..20: note = Target: ANGPTL3; (-) strand; PAM type: YTN; PAM sequence: TTT
  source 1..20: mol_type = other DNA
tctccttctttaaatagaaa

SEQ ID NO: 10705 - DNA, 20 bp, synthetic construct
  misc_feature 1..20: note = Description of Artificial Sequence: Synthetic oligonucleotide
  misc_feature 1..20: note = Target: ANGPTL3; (-) strand; PAM type: YTN; PAM sequence: TTC
  source 1..20: mol_type = other DNA
aaattttctccttctttaaa

SEQ ID NO: 10706 - DNA, 20 bp, synthetic construct
  misc_feature 1..20: note = Description of Artificial Sequence: Synthetic oligonucleotide
  misc_feature 1..20: note = Target: ANGPTL3; (-) strand; PAM type: YTN; PAM sequence: CTA
  source 1..20: mol_type = other DNA
gagaagaaattcaaattttc

SEQ ID NO: 10707 - DNA, 20 bp, synthetic construct
  misc_feature 1..20: note = Description of Artificial Sequence: Synthetic oligonucleotide
  misc_feature 1..20: note = Target: ANGPTL3; (-) strand; PAM type: YTN; PAM sequence: TTG
  source 1..20: mol_type = other DNA
agctagagaagaaattcaaa

SEQ ID NO: 10708 - DNA, 20 bp, synthetic construct
  misc_feature 1..20: note = Description of Artificial Sequence: Synthetic oligonucleotide
  misc_feature 1..20: note = Target: ANGPTL3; (-) strand; PAM type: YTN; PAM sequence: TTA
  source 1..20: mol_type = other DNA
tagaagtgtatgttgagcta

SEQ ID NO: 10709 - DNA, 20 bp, synthetic construct
  misc_feature 1..20: note = Description of Artificial Sequence: Synthetic oligonucleotide
  misc_feature 1..20: note = Target: ANGPTL3; (-) strand; PAM type: YTN; PAM sequence: TTC
  source 1..20: mol_type = other DNA
atgtaatggaattatagaag

SEQ ID NO: 10710 - DNA, 20 bp, synthetic construct
  misc_feature 1..20: note = Description of Artificial Sequence: Synthetic oligonucleotide
  misc_feature 1..20: note = Target: ANGPTL3; (-) strand; PAM type: YTN; PAM sequence: CTG
  source 1..20: mol_type = other DNA
gttcatgtaatggaattata

SEQ ID NO: 10711 - DNA, 20 bp, synthetic construct
  misc_feature 1..20: note = Description of Artificial Sequence: Synthetic oligonucleotide
  misc_feature 1..20: note = Target: ANGPTL3; (-) strand; PAM type: YTN; PAM sequence: CTC
  source 1..20: mol_type = other DNA
tggttcatgtaatggaatta

SEQ ID NO: 10712 - DNA, 20 bp, synthetic construct
  misc_feature 1..20: note = Description of Artificial Sequence: Synthetic oligonucleotide
  misc_feature 1..20: note = Target: ANGPTL3; (-) strand; PAM type: YTN; PAM sequence: TTA
  source 1..20: mol_type = other DNA
ctctggttcatgtaatggaa

SEQ ID NO: 10713 - DNA, 20 bp, synthetic construct
  misc_feature 1..20: note = Description of Artificial Sequence: Synthetic oligonucleotide
  misc_feature 1..20: note = Target: ANGPTL3; (-) strand; PAM type: YTN; PAM sequence: TTT
  source 1..20: mol_type = other DNA
actctggttcatgtaatgga

SEQ ID NO: 10714 - DNA, 20 bp, synthetic construct
  misc_feature 1..20: note = Description of Artificial Sequence: Synthetic oligonucleotide
  misc_feature 1..20: note = Target: ANGPTL3; (-) strand; PAM type: YTN; PAM sequence: CTT
  source 1..20: mol_type = other DNA
tactctggttcatgtaatgg

SEQ ID NO: 10715 - DNA, 20 bp, synthetic construct
  misc_feature 1..20: note = Description of Artificial Sequence: Synthetic oligonucleotide
  misc_feature 1..20: note = Target: ANGPTL3; (-) strand; PAM type: YTN; PAM sequence: TTA
  source 1..20: mol_type = other DNA
ccctttactctggttcatgt

SEQ ID NO: 10716 - DNA, 20 bp, synthetic construct
  misc_feature 1..20: note = Description of Artificial Sequence: Synthetic oligonucleotide
  misc_feature 1..20: note = Target: ANGPTL3; (-) strand; PAM type: YTN; PAM sequence: CTT
  source 1..20: mol_type = other DNA
accctttactctggttcatg

SEQ ID NO: 10717 - DNA, 20 bp, synthetic construct
  misc_feature 1..20: note = Description of Artificial Sequence: Synthetic oligonucleotide
  misc_feature 1..20: note = Target: ANGPTL3; (-) strand; PAM type: YTN; PAM sequence: TTC
  source 1..20: mol_type = other DNA
catcttaccctttactctgg

SEQ ID NO: 10718 - DNA, 20 bp, synthetic construct
  misc_feature 1..20: note = Description of Artificial Sequence: Synthetic oligonucleotide
  misc_feature 1..20: note = Target: ANGPTL3; (-) strand; PAM type: YTN; PAM sequence: TTT
  source 1..20: mol_type = other DNA
ccatcttaccctttactctg

SEQ ID NO: 10719 - DNA, 20 bp, synthetic construct
  misc_feature 1..20: note = Description of Artificial Sequence: Synthetic oligonucleotide
  misc_feature 1..20: note = Target: ANGPTL3; (-) strand; PAM type: YTN; PAM sequence: TTC
  source 1..20: mol_type = other DNA
atttccatcttaccctttac

SEQ ID NO: 10720 - DNA, 20 bp, synthetic construct
  misc_feature 1..20: note = Description of Artificial Sequence: Synthetic oligonucleotide
  misc_feature 1..20: note = Target: ANGPTL3; (-) strand; PAM type: YTN; PAM sequence: CTT
  source 1..20: mol_type = other DNA
catttccatcttacccttta

SEQ ID NO: 10721 - DNA, 20 bp, synthetic construct
  misc_feature 1..20: note = Description of Artificial Sequence: Synthetic oligonucleotide
  misc_feature 1..20: note = Target: ANGPTL3; (-) strand; PAM type: YTN; PAM sequence: TTC
  source 1..20: mol_type = other DNA
ttcatttccatcttaccctt

SEQ ID NO: 10722 - DNA, 20 bp, synthetic construct
  misc_feature 1..20: note = Description of Artificial Sequence: Synthetic oligonucleotide
  misc_feature 1..20: note = Target: ANGPTL3; (-) strand; PAM type: YTN; PAM sequence: TTA
  source 1..20: mol_type = other DNA
agtgtccaatatagaaccac

SEQ ID NO: 10723 - DNA, 20 bp, synthetic construct
  misc_feature 1..20: note = Description of Artificial Sequence: Synthetic oligonucleotide
  misc_feature 1..20: note = Target: ANGPTL3; (-) strand; PAM type: YTN; PAM sequence: TTT
  source 1..20: mol_type = other DNA
aagtgtccaatatagaacca

SEQ ID NO: 10724 - DNA, 20 bp, synthetic construct
  misc_feature 1..20: note = Description of Artificial Sequence: Synthetic oligonucleotide
  misc_feature 1..20: note = Target: ANGPTL3; (-) strand; PAM type: YTN; PAM sequence: TTT
  source 1..20: mol_type = other DNA
taagtgtccaatatagaacc

SEQ ID NO: 10725 - DNA, 20 bp, synthetic construct
  misc_feature 1..20: note = Description of Artificial Sequence: Synthetic oligonucleotide
  misc_feature 1..20: note = Target: ANGPTL3; (-) strand; PAM type: YTN; PAM sequence: TTT
  source 1..20: mol_type = other DNA
ttaagtgtccaatatagaac

SEQ ID NO: 10726 - DNA, 20 bp, synthetic construct
  misc_feature 1..20: note = Description of Artificial Sequence: Synthetic oligonucleotide
  misc_feature 1..20: note = Target: ANGPTL3; (-) strand; PAM type: YTN; PAM sequence: TTG
  source 1..20: mol_type = other DNA
tgtatgatttttaagtgtcc

SEQ ID NO: 10727 - DNA, 20 bp, synthetic construct
  misc_feature 1..20: note = Description of Artificial Sequence: Synthetic oligonucleotide
  misc_feature 1..20: note = Target: ANGPTL3; (-) strand; PAM type: YTN; PAM sequence: TTA
  source 1..20: mol_type = other DNA
ggttgtgtatgatttttaag

SEQ ID NO: 10728 - DNA, 20 bp, synthetic construct
  misc_feature 1..20: note = Description of Artificial Sequence: Synthetic oligonucleotide
  misc_feature 1..20: note = Target: ANGPTL3; (-) strand; PAM type: YTN; PAM sequence: TTG
  source 1..20: mol_type = other DNA
attaggttgtgtatgatttt

SEQ ID NO: 10729 - DNA, 20 bp, synthetic construct
  misc_feature 1..20: note = Description of Artificial Sequence: Synthetic oligonucleotide
  misc_feature 1..20: note = Target: ANGPTL3; (-) strand; PAM type: YTN; PAM sequence: TTT
  source 1..20: mol_type = other DNA
gattaggttgtgtatgattt

SEQ ID NO: 10730 - DNA, 20 bp, synthetic construct
  misc_feature 1..20: note = Description of Artificial Sequence: Synthetic oligonucleotide
  misc_feature 1..20: note = Target: ANGPTL3; (-) strand; PAM type: YTN; PAM sequence: TTT
  source 1..20: mol_type = other DNA
tgattaggttgtgtatgatt

SEQ ID NO: 10731 - DNA, 20 bp, synthetic construct
  misc_feature 1..20: note = Description of Artificial Sequence: Synthetic oligonucleotide
  misc_feature 1..20: note = Target: ANGPTL3; (-) strand; PAM type: YTN; PAM sequence: CTT
  source 1..20: mol_type = other DNA
ttgattaggttgtgtatgat

SEQ ID NO: 10732 - DNA, 20 bp, synthetic construct
  misc_feature 1..20: note = Description of Artificial Sequence: Synthetic oligonucleotide
  misc_feature 1..20: note = Target: ANGPTL3; (-) strand; PAM type: YTN; PAM sequence: TTA
  source 1..20: mol_type = other DNA
catcttttgattaggttgtg

SEQ ID NO: 10733 - DNA, 20 bp, synthetic construct
  misc_feature 1..20: note = Description of Artificial Sequence: Synthetic oligonucleotide
  misc_feature 1..20: note = Target: ANGPTL3; (-) strand; PAM type: YTN; PAM sequence: TTA
  source 1..20: mol_type = other DNA
aagaattacatcttttgatt

SEQ ID NO: 10734 - DNA, 20 bp, synthetic construct
  misc_feature 1..20: note = Description of Artificial Sequence: Synthetic oligonucleotide
  misc_feature 1..20: note = Target: ANGPTL3; (-) strand; PAM type: YTN; PAM sequence: TTT
  source 1..20: mol_type = other DNA
aaagaattacatcttttgat

SEQ ID NO: 10735 - DNA, 20 bp, synthetic construct
  misc_feature 1..20: note = Description of Artificial Sequence: Synthetic oligonucleotide
  misc_feature 1..20: note = Target: ANGPTL3; (-) strand; PAM type: YTN; PAM sequence: TTT
  source 1..20: mol_type = other DNA
taaagaattacatcttttga

SEQ ID NO: 10736 - DNA, 20 bp, synthetic construct
  misc_feature 1..20: note = Description of Artificial Sequence: Synthetic oligonucleotide
  misc_feature 1..20: note = Target: ANGPTL3; (-) strand; PAM type: YTN; PAM sequence: TTT
  source 1..20: mol_type = other DNA
ttaaagaattacatcttttg

SEQ ID NO: 10737 - DNA, 20 bp, synthetic construct
  misc_feature 1..20: note = Description of Artificial Sequence: Synthetic oligonucleotide
  misc_feature 1..20: note = Target: ANGPTL3; (-) strand; PAM type: YTN; PAM sequence: CTT
  source 1..20: mol_type = other DNA
tttaaagaattacatctttt

SEQ ID NO: 10738 - DNA, 20 bp, synthetic construct
  misc_feature 1..20: note = Description of Artificial Sequence: Synthetic oligonucleotide
  misc_feature 1..20: note = Target: ANGPTL3; (-) strand; PAM type: YTN; PAM sequence: CTC
  source 1..20: mol_type = other DNA
gtacctttttaaagaattac

SEQ ID NO: 10739 - DNA, 20 bp, synthetic construct
  misc_feature 1..20: note = Description of Artificial Sequence: Synthetic oligonucleotide
  misc_feature 1..20: note = Target: ANGPTL3; (-) strand; PAM type: YTN; PAM sequence: TTG
  source 1..20: mol_type = other DNA
gtctcgtacctttttaaaga

SEQ ID NO: 10740 - DNA, 20 bp, synthetic construct
  misc_feature 1..20: note = Description of Artificial Sequence: Synthetic oligonucleotide
  misc_feature 1..20: note = Target: ANGPTL3; (-) strand; PAM type: YTN; PAM sequence: TTT
  source 1..20: mol_type = other DNA
ggtctcgtacctttttaaag

SEQ ID NO: 10741 - DNA, 20 bp, synthetic construct
  misc_feature 1..20: note = Description of Artificial Sequence: Synthetic oligonucleotide
  misc_feature 1..20: note = Target: ANGPTL3; (-) strand; PAM type: YTN; PAM sequence: TTT
  source 1..20: mol_type = other DNA
tggtctcgtacctttttaaa

SEQ ID NO: 10742 - DNA, 20 bp, synthetic construct
  misc_feature 1..20: note = Description of Artificial Sequence: Synthetic oligonucleotide
  misc_feature 1..20: note = Target: ANGPTL3; (-) strand; PAM type: YTN; PAM sequence: CTG
  source 1..20: mol_type = other DNA
aattttggtctcgtaccttt

SEQ ID NO: 10743 - DNA, 20 bp, synthetic construct
  misc_feature 1..20: note = Description of Artificial Sequence: Synthetic oligonucleotide
  misc_feature 1..20: note = Target: ANGPTL3; (-) strand; PAM type: YTN; PAM sequence: TTC
  source 1..20: mol_type = other DNA
tgaattttggtctcgtacct

SEQ ID NO: 10744 - DNA, 20 bp, synthetic construct
  misc_feature 1..20: note = Description of Artificial Sequence: Synthetic oligonucleotide
  misc_feature 1..20: note = Target: ANGPTL3; (-) strand; PAM type: YTN; PAM sequence: TTT
  source 1..20: mol_type = other DNA
ctgaattttggtctcgtacc

SEQ ID NO: 10745 - DNA, 20 bp, synthetic construct
  misc_feature 1..20: note = Description of Artificial Sequence: Synthetic oligonucleotide
  misc_feature 1..20: note = Target: ANGPTL3; (-) strand; PAM type: YTN; PAM sequence: TTT
  source 1..20: mol_type = other DNA
tctgaattttggtctcgtac

SEQ ID NO: 10746 - DNA, 20 bp, synthetic construct
  misc_feature 1..20: note = Description of Artificial Sequence: Synthetic oligonucleotide
  misc_feature 1..20: note = Target: ANGPTL3; (-) strand; PAM type: YTN; PAM sequence: CTA
  source 1..20: mol_type = other DNA
gattttctgaattttggtct

SEQ ID NO: 10747 - DNA, 20 bp, synthetic construct
  misc_feature 1..20: note = Description of Artificial Sequence: Synthetic oligonucleotide
  misc_feature 1..20: note = Target: ANGPTL3; (-) strand; PAM type: YTN; PAM sequence: TTA
  source 1..20: mol_type = other DNA
tagtctagattttctgaatt

SEQ ID NO: 10748 - DNA, 20 bp, synthetic construct
  misc_feature 1..20: note = Description of Artificial Sequence: Synthetic oligonucleotide
  misc_feature 1..20: note = Target: ANGPTL3; (-) strand; PAM type: YTN; PAM sequence: TTG
  source 1..20: mol_type = other DNA
ttatagtctagattttctga

SEQ ID NO: 10749 - DNA, 20 bp, synthetic construct
  misc_feature 1..20: note = Description of Artificial Sequence: Synthetic oligonucleotide
  misc_feature 1..20: note = Target: ANGPTL3; (-) strand; PAM type: YTN; PAM sequence: TTT
  source 1..20: mol_type = other DNA
gttatagtctagattttctg

SEQ ID NO: 10750 - DNA, 20 bp, synthetic construct
  misc_feature 1..20: note = Description of Artificial Sequence: Synthetic oligonucleotide
  misc_feature 1..20: note = Target: ANGPTL3; (-) strand; PAM type: YTN; PAM sequence: TTT
  source 1..20: mol_type = other DNA
tgttatagtctagattttct

SEQ ID NO: 10751 - DNA, 20 bp, synthetic construct
  misc_feature 1..20: note = Description of Artificial Sequence: Synthetic oligonucleotide
  misc_feature 1..20: note = Target: ANGPTL3; (-) strand; PAM type: YTN; PAM sequence: TTG
  source 1..20: mol_type = other DNA
agaaattttgttatagtcta

SEQ ID NO: 10752 - DNA, 20 bp, synthetic construct
  misc_feature 1..20: note = Description of Artificial Sequence: Synthetic oligonucleotide
  misc_feature 1..20: note = Target: ANGPTL3; (-) strand; PAM type: YTN; PAM sequence: TTA
  source 1..20: mol_type = other DNA
agataatgtaaattgagaaa

SEQ ID NO: 10753 - DNA, 20 bp, synthetic construct
  misc_feature 1..20: note = Description of Artificial Sequence: Synthetic oligonucleotide
  misc_feature 1..20: note = Target: ANGPTL3; (-) strand; PAM type: YTN; PAM sequence: TTG
  source 1..20: mol_type = other DNA
catattaagataatgtaaat

SEQ ID NO: 10754 - DNA, 20 bp, synthetic construct
  misc_feature 1..20: note = Description of Artificial Sequence: Synthetic oligonucleotide
  misc_feature 1..20: note = Target: ANGPTL3; (-) strand; PAM type: YTN; PAM sequence: TTA
  source 1..20: mol_type = other DNA
attgcatattaagataatgt

SEQ ID NO: 10755 - DNA, 20 bp, synthetic construct
  misc_feature 1..20: note = Description of Artificial Sequence: Synthetic oligonucleotide
  misc_feature 1..20: note = Target: ANGPTL3; (-) strand; PAM type: YTN; PAM sequence: CTG
  source 1..20: mol_type = other DNA
gtgaaaattaattgcatatt

SEQ ID NO: 10756 - DNA, 20 bp, synthetic construct
  misc_feature 1..20: note = Description of Artificial Sequence: Synthetic oligonucleotide
  misc_feature 1..20: note = Target: ANGPTL3; (-) strand; PAM type: YTN; PAM sequence: TTA
  source 1..20: mol_type = other DNA
ctggtgaaaattaattgcat

SEQ ID NO: 10757 - DNA, 20 bp, synthetic construct
  misc_feature 1..20: note = Description of Artificial Sequence: Synthetic oligonucleotide
  misc_feature 1..20: note = Target: ANGPTL3; (-) strand; PAM type: YTN; PAM sequence: TTT
  source 1..20: mol_type = other DNA
actggtgaaaattaattgca

SEQ ID NO: 10758 - DNA, 20 bp, synthetic construct
  misc_feature 1..20: note = Description of Artificial Sequence: Synthetic oligonucleotide
  misc_feature 1..20: note = Target: ANGPTL3; (-) strand; PAM type: YTN; PAM sequence: TTT
  source 1..20: mol_type = other DNA
tactggtgaaaattaattgc

SEQ ID NO: 10759 - DNA, 20 bp, synthetic construct
  misc_feature 1..20: note = Description of Artificial Sequence: Synthetic oligonucleotide
  misc_feature 1..20: note = Target: ANGPTL3; (-) strand; PAM type: YTN; PAM sequence: CTA
  source 1..20: mol_type = other DNA
tagtattttactggtgaaaa

SEQ ID NO: 10760 - DNA, 20 bp, synthetic construct
  misc_feature 1..20: note = Description of Artificial Sequence: Synthetic oligonucleotide
  misc_feature 1..20: note = Target: ANGPTL3; (-) strand; PAM type: YTN; PAM sequence: TTG
  source 1..20: mol_type = other DNA
tacccatactatagtatttt

SEQ ID NO: 10761 - DNA, 20 bp, synthetic construct
  misc_feature 1..20: note = Description of Artificial Sequence: Synthetic oligonucleotide
  misc_feature 1..20: note = Target: ANGPTL3; (-) strand; PAM type: YTN; PAM sequence: TTT
  source 1..20: mol_type = other DNA
gtacccatactatagtattt

SEQ ID NO: 10762 - DNA, 20 bp, synthetic construct
  misc_feature 1..20: note = Description of Artificial Sequence: Synthetic oligonucleotide
  misc_feature 1..20: note = Target: ANGPTL3; (-) strand; PAM type: YTN; PAM sequence: CTA
  source 1..20: mol_type = other DNA
atcaatgcatttgtacccat

SEQ ID NO: 10763 - DNA, 20 bp, synthetic construct
  misc_feature 1..20: note = Description of Artificial Sequence: Synthetic oligonucleotide
  misc_feature 1..20: note = Target: ANGPTL3; (-) strand; PAM type: YTN; PAM sequence: TTA
  source 1..20: mol_type = other DNA
gaactaatcaatgcatttgt

SEQ ID NO: 10764 - DNA, 20 bp, synthetic construct
  misc_feature 1..20: note = Description of Artificial Sequence: Synthetic oligonucleotide
  misc_feature 1..20: note = Target: ANGPTL3; (-) strand; PAM type: YTN; PAM sequence: TTG
  source 1..20: mol_type = other DNA
taattagaactaatcaatgc

SEQ ID NO: 10765 - DNA, 20 bp, synthetic construct
  misc_feature 1..20: note = Description of Artificial Sequence: Synthetic oligonucleotide
  misc_feature 1..20: note = Target: ANGPTL3; (-) strand; PAM type: YTN; PAM sequence: TTT
  source 1..20: mol_type = other DNA
gtaattagaactaatcaatg

SEQ ID NO: 10766 - DNA, 20 bp, synthetic construct
  misc_feature 1..20: note = Description of Artificial Sequence: Synthetic oligonucleotide
  misc_feature 1..20: note = Target: ANGPTL3; (-) strand; PAM type: YTN; PAM sequence: TTT
  source 1..20: mol_type = other DNA
tgtaattagaactaatcaat

SEQ ID NO: 10767 - DNA, 20 bp, synthetic construct
  misc_feature 1..20: note = Description of Artificial Sequence: Synthetic oligonucleotide
  misc_feature 1..20: note = Target: ANGPTL3; (-) strand; PAM type: YTN; PAM sequence: TTT
  source 1..20: mol_type = other DNA
ttgtaattagaactaatcaa

SEQ ID NO: 10768 - DNA, 20 bp, synthetic construct
  misc_feature 1..20: note = Description of Artificial Sequence: Synthetic oligonucleotide
  misc_feature 1..20: note = Target: ANGPTL3; (-) strand; PAM type: YTN; PAM sequence: TTA
  source 1..20: mol_type = other DNA
gccatttttgtaattagaac

SEQ ID NO: 10769 - DNA, 20 bp, synthetic construct
  misc_feature 1..20: note = Description of Artificial Sequence: Synthetic oligonucleotide
  misc_feature 1..20: note = Target: ANGPTL3; (-) strand; PAM type: YTN; PAM sequence: TTA
  source 1..20: mol_type = other DNA
tatattagccatttttgtaa

SEQ ID NO: 10770 - DNA, 20 bp, synthetic construct
  misc_feature 1..20: note = Description of Artificial Sequence: Synthetic oligonucleotide
  misc_feature 1..20: note = Target: ANGPTL3; (-) strand; PAM type: YTN; PAM sequence: CTA
  source 1..20: mol_type = other DNA
cacagtattatatattagcc

SEQ ID NO: 10771 - DNA, 20 bp, synthetic construct
  misc_feature 1..20: note = Description of Artificial Sequence: Synthetic oligonucleotide
  misc_feature 1..20: note = Target: ANGPTL3; (-) strand; PAM type: YTN; PAM sequence: CTG
  source 1..20: mol_type = other DNA
atgtatcataaacactacac

SEQ ID NO: 10772 - DNA, 20 bp, synthetic construct
  misc_feature 1..20: note = Description of Artificial Sequence: Synthetic oligonucleotide
  misc_feature 1..20: note = Target: ANGPTL3; (-) strand; PAM type: YTN; PAM sequence: TTA
  source 1..20: mol_type = other DNA
tctgatgtatcataaacact

SEQ ID NO: 10773 - DNA, 20 bp, synthetic construct
  misc_feature 1..20: note = Description of Artificial Sequence: Synthetic oligonucleotide
  misc_feature 1..20: note = Target: ANGPTL3; (-) strand; PAM type: YTN; PAM sequence: TTA
  source 1..20: mol_type = other DNA
gaacattatctgatgtatca

SEQ ID NO: 10774 - DNA, 20 bp, synthetic construct
  misc_feature 1..20: note = Description of Artificial Sequence: Synthetic oligonucleotide
  misc_feature 1..20: note = Target: ANGPTL3; (-) strand; PAM type: YTN; PAM sequence: CTT
  source 1..20: mol_type = other DNA
agaacattatctgatgtatc

SEQ ID NO: 10775 - DNA, 20 bp, synthetic construct
  misc_feature 1..20: note = Description of Artificial Sequence: Synthetic oligonucleotide
  misc_feature 1..20: note = Target: ANGPTL3; (-) strand; PAM type: YTN; PAM sequence: TTC
  source 1..20: mol_type = other DNA
agagcacttagaacattatc

SEQ ID NO: 10776 - DNA, 20 bp, synthetic construct
  misc_feature 1..20: note = Description of Artificial Sequence: Synthetic oligonucleotide
  misc_feature 1..20: note = Target: ANGPTL3; (-) strand; PAM type: YTN; PAM sequence: TTT
  source 1..20: mol_type = other DNA
cagagcacttagaacattat

SEQ ID NO: 10777 - DNA, 20 bp, synthetic construct
  misc_feature 1..20: note = Description of Artificial Sequence: Synthetic oligonucleotide
  misc_feature 1..20: note = Target: ANGPTL3; (-) strand; PAM type: YTN; PAM sequence: TTT
  source 1..20: mol_type = other DNA
tcagagcacttagaacatta

SEQ ID NO: 10778 - DNA, 20 bp, synthetic construct
  misc_feature 1..20: note = Description of Artificial Sequence: Synthetic oligonucleotide
  misc_feature 1..20: note = Target: ANGPTL3; (-) strand; PAM type: YTN; PAM sequence: TTA
  source 1..20: mol_type = other DNA
tattttcagagcacttagaa

SEQ ID NO: 10779 - DNA, 20 bp, synthetic construct
  misc_feature 1..20: note = Description of Artificial Sequence: Synthetic oligonucleotide
  misc_feature 1..20: note = Target: ANGPTL3; (-) strand; PAM type: YTN; PAM sequence: TTT
  source 1..20: mol_type = other DNA
atattttcagagcacttaga

SEQ ID NO: 10780 - DNA, 20 bp, synthetic construct
  misc_feature 1..20: note = Description of Artificial Sequence: Synthetic oligonucleotide
  misc_feature 1..20: note = Target: ANGPTL3; (-) strand; PAM type: YTN; PAM sequence: TTA
  source 1..20: mol_type = other DNA
aaagtttatattttcagagc

SEQ ID NO: 10781 - DNA, 20 bp, synthetic construct
  misc_feature 1..20: note = Description of Artificial Sequence: Synthetic oligonucleotide
  misc_feature 1..20: note = Target: ANGPTL3; (-) strand; PAM type: YTN; PAM sequence: TTA
  source 1..20: mol_type = other DNA
tagggtcgtataaaagatta

SEQ ID NO: 10782 - DNA, 20 bp, synthetic construct
  misc_feature 1..20: note = Description of Artificial Sequence: Synthetic oligonucleotide
  misc_feature 1..20: note = Target: ANGPTL3; (-) strand; PAM type: YTN; PAM sequence: TTT
  source 1..20: mol_type = other DNA
atagggtcgtataaaagatt

SEQ ID NO: 10783 - DNA, 20 bp, synthetic construct
  misc_feature 1..20: note = Description of Artificial Sequence: Synthetic oligonucleotide
  misc_feature 1..20: note = Target: ANGPTL3; (-) strand; PAM type: YTN; PAM sequence: TTT
  source 1..20: mol_type = other DNA
tatagggtcgtataaaagat

SEQ ID NO: 10784 - DNA, 20 bp, synthetic construct
  misc_feature 1..20: note = Description of Artificial Sequence: Synthetic oligonucleotide
  misc_feature 1..20: note = Target: ANGPTL3; (-) strand; PAM type: YTN; PAM sequence: CTA
  source 1..20: mol_type = other DNA
ttttatagggtcgtataaaa

SEQ ID NO: 10785 - DNA, 20 bp, synthetic construct
  misc_feature 1..20: note = Description of Artificial Sequence: Synthetic oligonucleotide
  misc_feature 1..20: note = Target: ANGPTL3; (-) strand; PAM type: YTN; PAM sequence: CTC
  source 1..20: mol_type = other DNA
cagtgagaataacacctatt

SEQ ID NO: 10786 - DNA, 20 bp, synthetic construct
  misc_feature 1..20: note = Description of Artificial Sequence: Synthetic oligonucleotide
  misc_feature 1..20: note = Target: ANGPTL3; (-) strand; PAM type: YTN; PAM sequence: CTC
  source 1..20: mol_type = other DNA
tccagtgagaataacaccta

SEQ ID NO: 10787 - DNA, 20 bp, synthetic construct
  misc_feature 1..20: note = Description of Artificial Sequence: Synthetic oligonucleotide
  misc_feature 1..20: note = Target: ANGPTL3; (-) strand; PAM type: YTN; PAM sequence: CTC
  source 1..20: mol_type = other DNA
atctctccagtgagaataac

SEQ ID NO: 10788 - DNA, 20 bp, synthetic construct
  misc_feature 1..20: note = Description of Artificial Sequence: Synthetic oligonucleotide
  misc_feature 1..20: note = Target: ANGPTL3; (-) strand; PAM type: YTN; PAM sequence: TTC
  source 1..20: mol_type = other DNA
tcatctctccagtgagaata

SEQ ID NO: 10789 - DNA, 20 bp, synthetic construct
  misc_feature 1..20: note = Description of Artificial Sequence: Synthetic oligonucleotide
  misc_feature 1..20: note = Target: ANGPTL3; (-) strand; PAM type: YTN; PAM sequence: TTT
  source 1..20: mol_type = other DNA
ctcatctctccagtgagaat

SEQ ID NO: 10790 - DNA, 20 bp, synthetic construct
  misc_feature 1..20: note = Description of Artificial Sequence: Synthetic oligonucleotide
  misc_feature 1..20: note = Target: ANGPTL3; (-) strand; PAM type: YTN; PAM sequence: TTT
  source 1..20: mol_type = other DNA
tctcatctctccagtgagaa

SEQ ID NO: 10791 - DNA, 20 bp, synthetic construct
  misc_feature 1..20: note = Description of Artificial Sequence: Synthetic oligonucleotide
  misc_feature 1..20: note = Target: ANGPTL3; (-) strand; PAM type: YTN; PAM sequence: CTG
  source 1..20: mol_type = other DNA
ttttctcatctctccagtga

SEQ ID NO: 10792 - DNA, 20 bp, synthetic construct
  misc_feature 1..20: note = Description of Artificial Sequence: Synthetic oligonucleotide
  misc_feature 1..20: note = Target: ANGPTL3; (-) strand; PAM type: YTN; PAM sequence: CTG
  source 1..20: mol_type = other DNA
aacccctgttttctcatctc

SEQ ID NO: 10793 - DNA, 20 bp, synthetic construct
  misc_feature 1..20: note = Description of Artificial Sequence: Synthetic oligonucleotide
  misc_feature 1..20: note = Target: ANGPTL3; (-) strand; PAM type: YTN; PAM sequence: CTC
  source 1..20: mol_type = other DNA
tgaacccctgttttctcatc

SEQ ID NO: 10794 - DNA, 20 bp, synthetic construct
  misc_feature 1..20: note = Description of Artificial Sequence: Synthetic oligonucleotide
  misc_feature 1..20: note = Target: ANGPTL3; (-) strand; PAM type: YTN; PAM sequence: TTC
  source 1..20: mol_type = other DNA
acatctctgaacccctgttt

SEQ ID NO: 10795 - DNA, 20 bp, synthetic construct
  misc_feature 1..20: note = Description of Artificial Sequence: Synthetic oligonucleotide
  misc_feature 1..20: note = Target: ANGPTL3; (-) strand; PAM type: YTN; PAM sequence: CTT
  source 1..20: mol_type = other DNA
cacatctctgaacccctgtt

SEQ ID NO: 10796 - DNA, 20 bp, synthetic construct
  misc_feature 1..20: note = Description of Artificial Sequence: Synthetic oligonucleotide
  misc_feature 1..20: note = Target: ANGPTL3; (-) strand; PAM type: YTN; PAM sequence: TTA
  source 1..20: mol_type = other DNA
cttcacatctctgaacccct

SEQ ID NO: 10797 - DNA, 20 bp, synthetic construct
  misc_feature 1..20: note = Description of Artificial Sequence: Synthetic oligonucleotide
  misc_feature 1..20: note = Target: ANGPTL3; (-) strand; PAM type: YTN; PAM sequence: TTG
  source 1..20: mol_type = other DNA
gtcaaattacttcacatctc

SEQ ID NO: 10798 - DNA, 20 bp, synthetic construct
  misc_feature 1..20: note = Description of Artificial Sequence: Synthetic oligonucleotide
  misc_feature 1..20: note = Target: ANGPTL3; (-) strand; PAM type: YTN; PAM sequence: TTT
  source 1..20: mol_type = other DNA
ggtcaaattacttcacatct

SEQ ID NO: 10799 - DNA, 20 bp, synthetic construct
  misc_feature 1..20: note = Description of Artificial Sequence: Synthetic oligonucleotide
  misc_feature 1..20: note = Target: ANGPTL3; (-) strand; PAM type: YTN; PAM sequence: CTT
  source 1..20: mol_type = other DNA
tggtcaaattacttcacatc

SEQ ID NO: 10800 - DNA, 20 bp, synthetic construct
  misc_feature 1..20: note = Description of Artificial Sequence: Synthetic oligonucleotide
  misc_feature 1..20: note = Target: ANGPTL3; (-) strand; PAM type: YTN; PAM sequence: TTG
  source 1..20: mol_type = other DNA
tgacctttggtcaaattact

SEQ ID NO: 10801 - DNA, 20 bp, synthetic construct
  misc_feature 1..20: note = Description of Artificial Sequence: Synthetic oligonucleotide
  misc_feature 1..20: note = Target: ANGPTL3; (-) strand; PAM type: YTN; PAM sequence: TTT
  source 1..20: mol_type = other DNA
gtgacctttggtcaaattac

SEQ ID NO: 10802 - DNA, 20 bp, synthetic construct
  misc_feature 1..20: note = Description of Artificial Sequence: Synthetic oligonucleotide
  misc_feature 1..20: note = Target: ANGPTL3; (-) strand; PAM type: YTN; PAM sequence: CTT
  source 1..20: mol_type = other DNA
tgtgacctttggtcaaatta

SEQ ID NO: 10803 - DNA, 20 bp, synthetic construct
  misc_feature 1..20: note = Description of Artificial Sequence: Synthetic oligonucleotide
  misc_feature 1..20: note = Target: ANGPTL3; (-) strand; PAM type: YTN; PAM sequence: TTC
  source 1..20: mol_type = other DNA
agctttgtgacctttggtca

SEQ ID NO: 10804 - DNA, 20 bp, synthetic construct
  misc_feature 1..20: note = Description of Artificial Sequence: Synthetic oligonucleotide
  misc_feature 1..20: note = Target: ANGPTL3; (-) strand; PAM type: YTN; PAM sequence: CTT
  source 1..20: mol_type = other DNA
cagctttgtgacctttggtc

SEQ ID NO: 10805 - DNA, 20 bp, synthetic construct
  misc_feature 1..20: note = Description of Artificial Sequence: Synthetic oligonucleotide
  misc_feature 1..20: note = Target: ANGPTL3; (-) strand; PAM type: YTN; PAM sequence: TTC
  source 1..20: mol_type = other DNA
ttcagctttgtgacctttgg

SEQ ID NO: 10806 - DNA, 20 bp, synthetic construct
  misc_feature 1..20: note = Description of Artificial Sequence: Synthetic oligonucleotide
  misc_feature 1..20: note = Target: ANGPTL3; (-) strand; PAM type: YTN; PAM sequence: TTC
  source 1..20: mol_type = other DNA
atattcttcagctttgtgac

SEQ ID NO: 10807 - DNA, 20 bp, synthetic construct
  misc_feature 1..20: note = Description of Artificial Sequence: Synthetic oligonucleotide
  misc_feature 1..20: note = Target: ANGPTL3; (-) strand; PAM type: YTN; PAM sequence: TTT
  source 1..20: mol_type = other DNA
catattcttcagctttgtga

SEQ ID NO: 10808 - DNA, 20 bp, synthetic construct
  misc_feature 1..20: note = Description of Artificial Sequence: Synthetic oligonucleotide
  misc_feature 1..20: note = Target: ANGPTL3; (-) strand; PAM type: YTN; PAM sequence: CTG
  source 1..20: mol_type = other DNA
aatcagaatcccggatttca

SEQ ID NO: 10809 - DNA, 20 bp, synthetic construct
  misc_feature 1..20: note = Description of Artificial Sequence: Synthetic oligonucleotide
  misc_feature 1..20: note = Target: ANGPTL3; (-) strand; PAM type: YTN; PAM sequence: CTG
  source 1..20: mol_type = other DNA
cctgaatcagaatcccggat

SEQ ID NO: 10810 - DNA, 20 bp, synthetic construct
  misc_feature 1..20: note = Description of Artificial Sequence: Synthetic oligonucleotide
  misc_feature 1..20: note = Target: ANGPTL3; (-) strand; PAM type: YTN; PAM sequence: CTG
  source 1..20: mol_type = other DNA
gaataagactgcctgaatca

SEQ ID NO: 10811 - DNA, 20 bp, synthetic construct
  misc_feature 1..20: note = Description of Artificial Sequence: Synthetic oligonucleotide
  misc_feature 1..20: note = Target: ANGPTL3; (-) strand; PAM type: YTN; PAM sequence: TTC
  source 1..20: mol_type = other DNA
tggaataagactgcctgaat

SEQ ID NO: 10812 - DNA, 20 bp, synthetic construct
  misc_feature 1..20: note = Description of Artificial Sequence: Synthetic oligonucleotide
  misc_feature 1..20: note = Target: ANGPTL3; (-) strand; PAM type: YTN; PAM sequence: TTA
  source 1..20: mol_type = other DNA
agagcatgattctggaataa

SEQ ID NO: 10813 - DNA, 20 bp, synthetic construct
  misc_feature 1..20: note = Description of Artificial Sequence: Synthetic oligonucleotide
  misc_feature 1..20: note = Target: ANGPTL3; (-) strand; PAM type: YTN; PAM sequence: TTC
  source 1..20: mol_type = other DNA
catagtggttaagagcatga

SEQ ID NO: 10814 - DNA, 20 bp, synthetic construct
  misc_feature 1..20: note = Description of Artificial Sequence: Synthetic oligonucleotide
  misc_feature 1..20: note = Target: ANGPTL3; (-) strand; PAM type: YTN; PAM sequence: TTA
  source 1..20: mol_type = other DNA
cagtagaggcagtattccat

SEQ ID NO: 10815 - DNA, 20 bp, synthetic construct
  misc_feature 1..20: note = Description of Artificial Sequence: Synthetic oligonucleotide
  misc_feature 1..20: note = Target: ANGPTL3; (-) strand; PAM type: YTN; PAM sequence: TTG
  source 1..20: mol_type = other DNA
ggtataatagttacagtaga

SEQ ID NO: 10816 - DNA, 20 bp, synthetic construct
  misc_feature 1..20: note = Description of Artificial Sequence: Synthetic oligonucleotide
  misc_feature 1..20: note = Target: ANGPTL3; (-) strand; PAM type: YTN; PAM sequence: TTT
  source 1..20: mol_type = other DNA
gggtataatagttacagtag

SEQ ID NO: 10817 - DNA, 20 bp, synthetic construct
  misc_feature 1..20: note = Description of Artificial Sequence: Synthetic oligonucleotide
  misc_feature 1..20: note = Target: ANGPTL3; (-) strand; PAM type: YTN; PAM sequence: TTT
  source 1..20: mol_type = other DNA
tgggtataatagttacagta

SEQ ID NO: 10818 - DNA, 20 bp, synthetic construct
  misc_feature 1..20: note = Description of Artificial Sequence: Synthetic oligonucleotide
  misc_feature 1..20: note = Target: ANGPTL3; (-) strand; PAM type: YTN; PAM sequence: TTA
  source 1..20: mol_type = other DNA
agggttttgggtataatagt

SEQ ID NO: 10819 - DNA, 20 bp, synthetic construct
  misc_feature 1..20: note = Description of Artificial Sequence: Synthetic oligonucleotide
  misc_feature 1..20: note = Target: ANGPTL3; (-) strand; PAM type: YTN; PAM sequence: TTA
  source 1..20: mol_type = other DNA
ggattaagggttttgggtat

SEQ ID NO: 10820 - DNA, 20 bp, synthetic construct
  misc_feature 1..20: note = Description of Artificial Sequence: Synthetic oligonucleotide
  misc_feature 1..20: note = Target: ANGPTL3; (-) strand; PAM type: YTN; PAM sequence: CTT
  source 1..20: mol_type = other DNA
aggattaagggttttgggta

SEQ ID NO: 10821 - DNA, 20 bp, synthetic construct
  misc_feature 1..20: note = Description of Artificial Sequence: Synthetic oligonucleotide
  misc_feature 1..20: note = Target: ANGPTL3; (-) strand; PAM type: YTN; PAM sequence: TTG
  source 1..20: mol_type = other DNA
atgacttaggattaagggtt

SEQ ID NO: 10822 - DNA, 20 bp, synthetic construct
  misc_feature 1..20: note = Description of Artificial Sequence: Synthetic oligonucleotide
  misc_feature 1..20: note = Target: ANGPTL3; (-) strand; PAM type: YTN; PAM sequence: TTT
  source 1..20: mol_type = other DNA
gatgacttaggattaagggt

SEQ ID NO: 10823 - DNA, 20 bp, synthetic construct
  misc_feature 1..20: note = Description of Artificial Sequence: Synthetic oligonucleotide
  misc_feature 1..20: note = Target: ANGPTL3; (-) strand; PAM type: YTN; PAM sequence: TTT
  source 1..20: mol_type = other DNA
tgatgacttaggattaaggg

SEQ ID NO: 10824 - DNA, 20 bp, synthetic construct
  misc_feature 1..20: note = Description of Artificial Sequence: Synthetic oligonucleotide
  misc_feature 1..20: note = Target: ANGPTL3; (-) strand; PAM type: YTN; PAM sequence: CTT
  source 1..20: mol_type = other DNA
ttgatgacttaggattaagg

SEQ ID NO: 10825 - DNA, 20 bp, synthetic construct
  misc_feature 1..20: note = Description of Artificial Sequence: Synthetic oligonucleotide
  misc_feature 1..20: note = Target: ANGPTL3; (-) strand; PAM type: YTN; PAM sequence: TTC
  source 1..20: mol_type = other DNA
cttttgatgacttaggatta

SEQ ID NO: 10826 - DNA, 20 bp, synthetic construct
  misc_feature 1..20: note = Description of Artificial Sequence: Synthetic oligonucleotide
  misc_feature 1..20: note = Target: ANGPTL3; (-) strand; PAM type: YTN; PAM sequence: CTT
  source 1..20: mol_type = other DNA
ccttttgatgacttaggatt

SEQ ID NO: 10827 - DNA, 20 bp, synthetic construct
  misc_feature 1..20: note = Description of Artificial Sequence: Synthetic oligonucleotide
  misc_feature 1..20: note = Target: ANGPTL3; (-) strand; PAM type: YTN; PAM sequence: CTC
  source 1..20: mol_type = other DNA
ttccttttgatgacttagga

SEQ ID NO: 10828 - DNA, 20 bp, synthetic construct
  misc_feature 1..20: note = Description of Artificial Sequence: Synthetic oligonucleotide
  misc_feature 1..20: note = Target: ANGPTL3; (-) strand; PAM type: YTN; PAM sequence: TTG
  source 1..20: mol_type = other DNA
tgtaaaatagaggctcttcc

SEQ ID NO: 10829 - DNA, 20 bp, synthetic construct
  misc_feature 1..20: note = Description of Artificial Sequence: Synthetic oligonucleotide
  misc_feature 1..20: note = Target: ANGPTL3; (-) strand; PAM type: YTN; PAM sequence: TTC
  source 1..20: mol_type = other DNA
attgtgtaaaatagaggctc

SEQ ID NO: 10830 - DNA, 20 bp, synthetic construct
  misc_feature 1..20: note = Description of Artificial Sequence: Synthetic oligonucleotide
  misc_feature 1..20: note = Target: ANGPTL3; (-) strand; PAM type: YTN; PAM sequence: CTT
  source 1..20: mol_type = other DNA
cattgtgtaaaatagaggct

SEQ ID NO: 10831 - DNA, 20 bp, synthetic construct
  misc_feature 1..20: note = Description of Artificial Sequence: Synthetic oligonucleotide
  misc_feature 1..20: note = Target: ANGPTL3; (-) strand; PAM type: YTN; PAM sequence: CTC
  source 1..20: mol_type = other DNA
ttcattgtgtaaaatagagg

SEQ ID NO: 10832 - DNA, 20 bp, synthetic construct
  misc_feature 1..20: note = Description of Artificial Sequence: Synthetic oligonucleotide
  misc_feature 1..20: note = Target: ANGPTL3; (-) strand; PAM type: YTN; PAM sequence: TTA
  source 1..20: mol_type = other DNA
gaaatgcctcttcattgtgt

SEQ ID NO: 10833 - DNA, 20 bp, synthetic construct
  misc_feature 1..20: note = Description of Artificial Sequence: Synthetic oligonucleotide
  misc_feature 1..20: note = Target: ANGPTL3; (-) strand; PAM type: YTN; PAM sequence: CTT
  source 1..20: mol_type = other DNA
agaaatgcctcttcattgtg

SEQ ID NO: 10834 - DNA, 20 bp, synthetic construct
  misc_feature 1..20: note = Description of Artificial Sequence: Synthetic oligonucleotide
  misc_feature 1..20: note = Target: ANGPTL3; (-) strand; PAM type: YTN; PAM sequence: TTC
  source 1..20: mol_type = other DNA
ttagaaatgcctcttcattg

SEQ ID NO: 10835 - DNA, 20 bp, synthetic construct
  misc_feature 1..20: note = Description of Artificial Sequence: Synthetic oligonucleotide
  misc_feature 1..20: note = Target: ANGPTL3; (-) strand; PAM type: YTN; PAM sequence: CTA
  source 1..20: mol_type = other DNA
ttcttagaaatgcctcttca

SEQ ID NO: 10836 - DNA, 20 bp, synthetic construct
  misc_feature 1..20: note = Description of Artificial Sequence: Synthetic oligonucleotide
  misc_feature 1..20: note = Target: ANGPTL3; (-) strand; PAM type: YTN; PAM sequence: TTC
  source 1..20: mol_type = other DNA
tattcttagaaatgcctctt

SEQ ID NO: 10837 - DNA, 20 bp, synthetic construct
  misc_feature 1..20: note = Description of Artificial Sequence: Synthetic oligonucleotide
  misc_feature 1..20: note = Target: ANGPTL3; (-) strand; PAM type: YTN; PAM sequence: TTT
  source 1..20: mol_type = other DNA
ctattcttagaaatgcctct

SEQ ID NO: 10838 - DNA, 20 bp, synthetic construct
  misc_feature 1..20: note = Description of Artificial Sequence: Synthetic oligonucleotide
  misc_feature 1..20: note = Target: ANGPTL3; (-) strand; PAM type: YTN; PAM sequence: CTA
  source 1..20: mol_type = other DNA
aatttctattcttagaaatg

SEQ ID NO: 10839 - DNA, 20 bp, synthetic construct
  misc_feature 1..20: note = Description of Artificial Sequence: Synthetic oligonucleotide
  misc_feature 1..20: note = Target: ANGPTL3; (-) strand; PAM type: YTN; PAM sequence: CTC
  source 1..20: mol_type = other DNA
gtccctaaatttctattctt

SEQ ID NO: 10840 - DNA, 20 bp, synthetic construct
  misc_feature 1..20: note = Description of Artificial Sequence: Synthetic oligonucleotide
  misc_feature 1..20: note = Target: ANGPTL3; (-) strand; PAM type: YTN; PAM sequence: CTG
  source 1..20: mol_type = other DNA
tgctcgtccctaaatttcta

SEQ ID NO: 10841 - DNA, 20 bp, synthetic construct
  misc_feature 1..20: note = Description of Artificial Sequence: Synthetic oligonucleotide
  misc_feature 1..20: note = Target: ANGPTL3; (-) strand; PAM type: YTN; PAM sequence: TTA
  source 1..20: mol_type = other DNA
aaggagtaagccactgtgct

SEQ ID NO: 10842 - DNA, 20 bp, synthetic construct
  misc_feature 1..20: note = Description of Artificial Sequence: Synthetic oligonucleotide
  misc_feature 1..20: note = Target: ANGPTL3; (-) strand; PAM type: YTN; PAM sequence: CTG
  source 1..20: mol_type = other DNA
atattaaaggagtaagccac

SEQ ID NO: 10843 - DNA, 20 bp, synthetic construct
  misc_feature 1..20: note = Description of Artificial Sequence: Synthetic oligonucleotide
  misc_feature 1..20: note = Target: ANGPTL3; (-) strand; PAM type: YTN; PAM sequence: CTC
  source 1..20: mol_type = other DNA
aaagtgctgatattaaagga

SEQ ID NO: 10844 - DNA, 20 bp, synthetic construct
  misc_feature 1..20: note = Description of Artificial Sequence: Synthetic oligonucleotide
  misc_feature 1..20: note = Target: ANGPTL3; (-) strand; PAM type: YTN; PAM sequence: CTC
  source 1..20: mol_type = other DNA
tcaaagtgctgatattaaag

SEQ ID NO: 10845 - DNA, 20 bp, synthetic construct
  misc_feature 1..20: note = Description of Artificial Sequence: Synthetic oligonucleotide
  misc_feature 1..20: note = Target: ANGPTL3; (-) strand; PAM type: YTN; PAM sequence: CTC
  source 1..20: mol_type = other DNA
ccatatcagcctctcaaagt

SEQ ID NO: 10846 - DNA, 20 bp, synthetic construct
  misc_feature 1..20: note = Description of Artificial Sequence: Synthetic oligonucleotide
  misc_feature 1..20: note = Target: ANGPTL3; (-) strand; PAM type: YTN; PAM sequence: TTC
  source 1..20: mol_type = other DNA
aagtgaacctcccatatcag

SEQ ID NO: 10847 - DNA, 20 bp, synthetic construct
  misc_feature 1..20: note = Description of Artificial Sequence: Synthetic oligonucleotide
  misc_feature 1..20: note = Target: ANGPTL3; (-) strand; PAM type: YTN; PAM sequence: CTT
  source 1..20: mol_type = other DNA
caagtgaacctcccatatca

SEQ ID NO: 10848 - DNA, 20 bp, synthetic construct
  misc_feature 1..20: note = Description of Artificial Sequence: Synthetic oligonucleotide
  misc_feature 1..20: note = Target: ANGPTL3; (-) strand; PAM type: YTN; PAM sequence: CTG
  source 1..20: mol_type = other DNA
acttcaagtgaacctcccat

SEQ ID NO: 10849 - DNA, 20 bp, synthetic construct
  misc_feature 1..20: note = Description of Artificial Sequence: Synthetic oligonucleotide
  misc_feature 1..20: note = Target: ANGPTL3; (-) strand; PAM type: YTN; PAM sequence: CTC
  source 1..20: mol_type = other DNA
ctgacttcaagtgaacctcc

SEQ ID NO: 10850 - DNA, 20 bp, synthetic construct
  misc_feature 1..20: note = Description of Artificial Sequence: Synthetic oligonucleotide
  misc_feature 1..20: note = Target: ANGPTL3; (-) strand; PAM type: YTN; PAM sequence: TTG
  source 1..20: mol_type = other DNA
aactcctgacttcaagtgaa

SEQ ID NO: 10851 - DNA, 20 bp, synthetic construct
  misc_feature 1..20: note = Description of Artificial Sequence: Synthetic oligonucleotide
  misc_feature 1..20: note = Target: ANGPTL3; (-) strand; PAM type: YTN; PAM sequence: CTT
  source 1..20: mol_type = other DNA
gaactcctgacttcaagtga

SEQ ID NO: 10852 - DNA, 20 bp, synthetic construct
  misc_feature 1..20: note = Description of Artificial Sequence: Synthetic oligonucleotide
  misc_feature 1..20: note = Target: ANGPTL3; (-) strand; PAM type: YTN; PAM sequence: CTG
  source 1..20: mol_type = other DNA
accttgaactcctgacttca

SEQ ID NO: 10853 - DNA, 20 bp, synthetic construct
  misc_feature 1..20: note = Description of Artificial Sequence: Synthetic oligonucleotide
  misc_feature 1..20: note = Target: ANGPTL3; (-) strand; PAM type: YTN; PAM sequence: TTG
  source 1..20: mol_type = other DNA
cccaagctgaccttgaactc

SEQ ID NO: 10854 - DNA, 20 bp, synthetic construct
  misc_feature 1..20: note = Description of Artificial Sequence: Synthetic oligonucleotide
  misc_feature 1..20: note = Target: ANGPTL3; (-) strand; PAM type: YTN; PAM sequence: CTA
  source 1..20: mol_type = other DNA
tgttgcccaagctgaccttg

SEQ ID NO: 10855 - DNA, 20 bp, synthetic construct
  misc_feature 1..20: note = Description of Artificial Sequence: Synthetic oligonucleotide
  misc_feature 1..20: note = Target: ANGPTL3; (-) strand; PAM type: YTN; PAM sequence: TTC
  source 1..20: mol_type = other DNA
actatgttgcccaagctgac

SEQ ID NO: 10856 - DNA, 20 bp, synthetic construct
  misc_feature 1..20: note = Description of Artificial Sequence: Synthetic oligonucleotide
  misc_feature 1..20: note = Target: ANGPTL3; (-) strand; PAM type: YTN; PAM sequence: TTT
  source 1..20: mol_type = other DNA
cactatgttgcccaagctga

SEQ ID NO: 10857 - DNA, 20 bp, synthetic construct
  misc_feature 1..20: note = Description of Artificial Sequence: Synthetic oligonucleotide
  misc_feature 1..20: note = Target: ANGPTL3; (-) strand; PAM type: YTN; PAM sequence: CTG
  source 1..20: mol_type = other DNA
tgtttcactatgttgcccaa

SEQ ID NO: 10858 - DNA, 20 bp, synthetic construct
  misc_feature 1..20: note = Description of Artificial Sequence: Synthetic oligonucleotide
  misc_feature 1..20: note = Target: ANGPTL3; (-) strand; PAM type: YTN; PAM sequence: TTG
  source 1..20: mol_type = other DNA
tagagactgtgtttcactat

SEQ ID NO: 10859 - DNA, 20 bp, synthetic construct
  misc_feature 1..20: note = Description of Artificial Sequence: Synthetic oligonucleotide
  misc_feature 1..20: note = Target: ANGPTL3; (-) strand; PAM type: YTN; PAM sequence: TTT
  source 1..20: mol_type = other DNA
gtagagactgtgtttcacta

SEQ ID NO: 10860 - DNA, 20 bp, synthetic construct
  misc_feature 1..20: note = Description of Artificial Sequence: Synthetic oligonucleotide
  misc_feature 1..20: note = Target: ANGPTL3; (-) strand; PAM type: YTN; PAM sequence: TTT
  source 1..20: mol_type = other DNA
tgtagagactgtgtttcact

SEQ ID NO: 10861 - DNA, 20 bp, synthetic construct
  misc_feature 1..20: note = Description of Artificial Sequence: Synthetic oligonucleotide
  misc_feature 1..20: note = Target: ANGPTL3; (-) strand; PAM type: YTN; PAM sequence: TTA
  source 1..20: mol_type = other DNA
aatattttgtagagactgtg

SEQ ID NO: 10862 - DNA, 20 bp, synthetic construct
  misc_feature 1..20: note = Description of Artificial Sequence: Synthetic oligonucleotide
  misc_feature 1..20: note = Target: ANGPTL3; (-) strand; PAM type: YTN; PAM sequence: TTT
  source 1..20: mol_type = other DNA
aaatattttgtagagactgt

SEQ ID NO: 10863 - DNA, 20 bp, synthetic construct
  misc_feature 1..20: note = Description of Artificial Sequence: Synthetic oligonucleotide
  misc_feature 1..20: note = Target: ANGPTL3; (-) strand; PAM type: YTN; PAM sequence: TTT
  source 1..20: mol_type = other DNA
taaatattttgtagagactg

SEQ ID NO: 10864 - DNA, 20 bp, synthetic construct
  misc_feature 1..20: note = Description of Artificial Sequence: Synthetic oligonucleotide
  misc_feature 1..20: note = Target: ANGPTL3; (-) strand; PAM type: YTN; PAM sequence: TTT
  source 1..20: mol_type = other DNA
ttaaatattttgtagagact

SEQ ID NO: 10865 - DNA, 20 bp, synthetic construct
  misc_feature 1..20: note = Description of Artificial Sequence: Synthetic oligonucleotide
  misc_feature 1..20: note = Target: ANGPTL3; (-) strand; PAM type: YTN; PAM sequence: CTA
  source 1..20: mol_type = other DNA
atttttaaatattttgtaga

SEQ ID NO: 10866 - DNA, 20 bp, synthetic construct
  misc_feature 1..20: note = Description of Artificial Sequence: Synthetic oligonucleotide
  misc_feature 1..20: note = Target: ANGPTL3; (-) strand; PAM type: YTN; PAM sequence: CTA
  source 1..20: mol_type = other DNA
tagatgcatgccaccacacc

SEQ ID NO: 10867 - DNA, 20 bp, synthetic construct
  misc_feature 1..20: note = Description of Artificial Sequence: Synthetic oligonucleotide
  misc_feature 1..20: note = Target: ANGPTL3; (-) strand; PAM type: YTN; PAM sequence: CTG
  source 1..20: mol_type = other DNA
agactatagatgcatgccac

SEQ ID NO: 10868 - DNA, 20 bp, synthetic construct
  misc_feature 1..20: note = Description of Artificial Sequence: Synthetic oligonucleotide
  misc_feature 1..20: note = Target: ANGPTL3; (-) strand; PAM type: YTN; PAM sequence: CTC
  source 1..20: mol_type = other DNA
ccaagtagctgagactatag

SEQ ID NO: 10869 - DNA, 20 bp, synthetic construct
  misc_feature 1..20: note = Description of Artificial Sequence: Synthetic oligonucleotide
  misc_feature 1..20: note = Target: ANGPTL3; (-) strand; PAM type: YTN; PAM sequence: CTG
  source 1..20: mol_type = other DNA
tctcccaagtagctgagact

SEQ ID NO: 10870 - DNA, 20 bp, synthetic construct
  misc_feature 1..20: note = Description of Artificial Sequence: Synthetic oligonucleotide
  misc_feature 1..20: note = Target: ANGPTL3; (-) strand; PAM type: YTN; PAM sequence: CTC
  source 1..20: mol_type = other DNA
tgtctcccaagtagctgaga

SEQ ID NO: 10871 - DNA, 20 bp, synthetic construct
  misc_feature 1..20: note = Description of Artificial Sequence: Synthetic oligonucleotide
  misc_feature 1..20: note = Target: ANGPTL3; (-) strand; PAM type: YTN; PAM sequence: CTC
  source 1..20: mol_type = other DNA
cctctgtctcccaagtagct

SEQ ID NO: 10872 - DNA, 20 bp, synthetic construct
  misc_feature 1..20: note = Description of Artificial Sequence: Synthetic oligonucleotide
  misc_feature 1..20: note = Target: ANGPTL3; (-) strand; PAM type: YTN; PAM sequence: CTC
  source 1..20: mol_type = other DNA
ctccctctgtctcccaagta

SEQ ID NO: 10873 - DNA, 20 bp, synthetic construct
  misc_feature 1..20: note = Description of Artificial Sequence: Synthetic oligonucleotide
  misc_feature 1..20: note = Target: ANGPTL3; (-) strand; PAM type: YTN; PAM sequence: CTC
  source 1..20: mol_type = other DNA
gagcaagcctcctccctctg

SEQ ID NO: 10874 - DNA, 20 bp, synthetic construct
  misc_feature 1..20: note = Description of Artificial Sequence: Synthetic oligonucleotide
  misc_feature 1..20: note = Target: ANGPTL3; (-) strand; PAM type: YTN; PAM sequence: CTG
  source 1..20: mol_type = other DNA
ggctcgagcaagcctcctcc

SEQ ID NO: 10875 - DNA, 20 bp, synthetic construct
  misc_feature 1..20: note = Description of Artificial Sequence: Synthetic oligonucleotide
  misc_feature 1..20: note = Target: ANGPTL3; (-) strand; PAM type: YTN; PAM sequence: CTC
  source 1..20: mol_type = other DNA
ctgggctcgagcaagcctcc

SEQ ID NO: 10876 - DNA, 20 bp, synthetic construct
  misc_feature 1..20: note = Description of Artificial Sequence: Synthetic oligonucleotide
  misc_feature 1..20: note = Target: ANGPTL3; (-) strand; PAM type: YTN; PAM sequence: CTA
  source 1..20: mol_type = other DNA
tagccacgaactcctgggct

SEQ ID NO: 10877 - DNA, 20 bp, synthetic construct
  misc_feature 1..20: note = Description of Artificial Sequence: Synthetic oligonucleotide
  misc_feature 1..20: note = Target: ANGPTL3; (-) strand; PAM type: YTN; PAM sequence: CTC
  source 1..20: mol_type = other DNA
actatagccacgaactcctg

SEQ ID NO: 10878 - DNA, 20 bp, synthetic construct
  misc_feature 1..20: note = Description of Artificial Sequence: Synthetic oligonucleotide
  misc_feature 1..20: note = Target: ANGPTL3; (-) strand; PAM type: YTN; PAM sequence: CTG
  source 1..20: mol_type = other DNA
gagtgcagtggcatgatcat

SEQ ID NO: 10879 - DNA, 20 bp, synthetic construct
  misc_feature 1..20: note = Description of Artificial Sequence: Synthetic oligonucleotide
  misc_feature 1..20: note = Target: ANGPTL3; (-) strand; PAM type: YTN; PAM sequence: TTG
  source 1..20: mol_type = other DNA
tccaggctggagtgcagtgg

SEQ ID NO: 10880 - DNA, 20 bp, synthetic construct
  misc_feature 1..20: note = Description of Artificial Sequence: Synthetic oligonucleotide
  misc_feature 1..20: note = Target: ANGPTL3; (-) strand; PAM type: YTN; PAM sequence: CTG
  source 1..20: mol_type = other DNA
ttgtccaggctggagtgcag

SEQ ID NO: 10881 - DNA, 20 bp, synthetic construct
  misc_feature 1..20: note = Description of Artificial Sequence: Synthetic oligonucleotide
  misc_feature 1..20: note = Target: ANGPTL3; (-) strand; PAM type: YTN; PAM sequence: CTC
  source 1..20: mol_type = other DNA
tgttgtccaggctggagtgc

SEQ ID NO: 10882 - DNA, 20 bp, synthetic construct
  misc_feature 1..20: note = Description of Artificial Sequence: Synthetic oligonucleotide
  misc_feature 1..20: note = Target: ANGPTL3; (-) strand; PAM type: YTN; PAM sequence: TTG
  source 1..20: mol_type = other DNA
ctctgttgtccaggctggag

SEQ ID NO: 10883 - DNA, 20 bp, synthetic construct
  misc_feature 1..20: note = Description of Artificial Sequence: Synthetic oligonucleotide
  misc_feature 1..20: note = Target: ANGPTL3; (-) strand; PAM type: YTN; PAM sequence: CTT
  source 1..20: mol_type = other DNA
gctctgttgtccaggctgga

SEQ ID NO: 10884 - DNA, 20 bp, synthetic construct
  misc_feature 1..20: note = Description of Artificial Sequence: Synthetic oligonucleotide
  misc_feature 1..20: note = Target: ANGPTL3; (-) strand; PAM type: YTN; PAM sequence: TTA
  source 1..20: mol_type = other DNA
gagacagggtcttgctctgt

SEQ ID NO: 10885 - DNA, 20 bp, synthetic construct
  misc_feature 1..20: note = Description of Artificial Sequence: Synthetic oligonucleotide
  misc_feature 1..20: note = Target: ANGPTL3; (-) strand; PAM type: YTN; PAM sequence: TTT
  source 1..20: mol_type = other DNA
agagacagggtcttgctctg

SEQ ID NO: 10886 - DNA, 20 bp, synthetic construct
  misc_feature 1..20: note = Description of Artificial Sequence: Synthetic oligonucleotide
  misc_feature 1..20: note = Target: ANGPTL3; (-) strand; PAM type: YTN; PAM sequence: TTT
  source 1..20: mol_type = other DNA
tagagacagggtcttgctct

SEQ ID NO: 10887 - DNA, 20 bp, synthetic construct
  misc_feature 1..20: note = Description of Artificial Sequence: Synthetic oligonucleotide
  misc_feature 1..20: note = Target: ANGPTL3; (-) strand; PAM type: YTN; PAM sequence: TTT
  source 1..20: mol_type = other DNA
ttagagacagggtcttgctc

SEQ ID NO: 10888 - DNA, 20 bp, synthetic construct
  misc_feature 1..20: note = Description of Artificial Sequence: Synthetic oligonucleotide
  misc_feature 1..20: note = Target: ANGPTL3; (-) strand; PAM type: YTN; PAM sequence: TTT
  source 1..20: mol_type = other DNA
tttagagacagggtcttgct

SEQ ID NO: 10889 - DNA, 20 bp, synthetic construct
  misc_feature 1..20: note = Description of Artificial Sequence: Synthetic oligonucleotide
  misc_feature 1..20: note = Target: ANGPTL3; (-) strand; PAM type: YTN; PAM sequence: CTT
  source 1..20: mol_type = other DNA
ttttagagacagggtcttgc

SEQ ID NO: 10890 - DNA, 20 bp, synthetic construct
  misc_feature 1..20: note = Description of Artificial Sequence: Synthetic oligonucleotide
  misc_feature 1..20: note = Target: ANGPTL3; (-) strand; PAM type: YTN; PAM sequence: TTC
  source 1..20: mol_type = other DNA
ttttttagagacagggtctt

SEQ ID NO: 10891 - DNA, 20 bp, synthetic construct
  misc_feature 1..20: note = Description of Artificial Sequence: Synthetic oligonucleotide
  misc_feature 1..20: note = Target: ANGPTL3; (-) strand; PAM type: YTN; PAM sequence: TTT
  source 1..20: mol_type = other DNA
cttttttagagacagggtct

SEQ ID NO: 10892 - DNA, 20 bp, synthetic construct
  misc_feature 1..20: note = Description of Artificial Sequence: Synthetic oligonucleotide
  misc_feature 1..20: note = Target: ANGPTL3; (-) strand; PAM type: YTN; PAM sequence: TTT
  source 1..20: mol_type = other DNA
tcttttttagagacagggtc

SEQ ID NO: 10893 - DNA, 20 bp, synthetic construct
  misc_feature 1..20: note = Description of Artificial Sequence: Synthetic oligonucleotide
  misc_feature 1..20: note = Target: ANGPTL3; (-) strand; PAM type: YTN; PAM sequence: CTT
  source 1..20: mol_type = other DNA
ttcttttttagagacagggt

SEQ ID NO: 10894 - DNA, 20 bp, synthetic construct
  misc_feature 1..20: note = Description of Artificial Sequence: Synthetic oligonucleotide
  misc_feature 1..20: note = Target: ANGPTL3; (-) strand; PAM type: YTN; PAM sequence: TTC
  source 1..20: mol_type = other DNA
ttttcttttttagagacagg

SEQ ID NO: 10895 - DNA, 20 bp, synthetic construct
  misc_feature 1..20: note = Description of Artificial Sequence: Synthetic oligonucleotide
  misc_feature 1..20: note = Target: ANGPTL3; (-) strand; PAM type: YTN; PAM sequence: TTT
  source 1..20: mol_type = other DNA
cttttcttttttagagacag

SEQ ID NO: 10896 - DNA, 20 bp, synthetic construct
  misc_feature 1..20: note = Description of Artificial Sequence: Synthetic oligonucleotide
  misc_feature 1..20: note = Target: ANGPTL3; (-) strand; PAM type: YTN; PAM sequence: TTC
  source 1..20: mol_type = other DNA
caaatttcttttctttttta

SEQ ID NO: 10897 - DNA, 20 bp, synthetic construct
  misc_feature 1..20: note = Description of Artificial Sequence: Synthetic oligonucleotide
  misc_feature 1..20: note = Target: ANGPTL3; (-) strand; PAM type: YTN; PAM sequence: TTT
  source 1..20: mol_type = other DNA
ccaaatttcttttctttttt

SEQ ID NO: 10898 - DNA, 20 bp, synthetic construct
  misc_feature 1..20: note = Description of Artificial Sequence: Synthetic oligonucleotide
  misc_feature 1..20: note = Target: ANGPTL3; (-) strand; PAM type: YTN; PAM sequence: TTA
  source 1..20: mol_type = other DNA
atacaaaataaaccatttcc

SEQ ID NO: 10899 - DNA, 20 bp, synthetic construct
  misc_feature 1..20: note = Description of Artificial Sequence: Synthetic oligonucleotide
  misc_feature 1..20: note = Target: ANGPTL3; (-) strand; PAM type: YTN; PAM sequence: TTG
  source 1..20: mol_type = other DNA
ttaatacaaaataaaccatt

SEQ ID NO: 10900 - DNA, 20 bp, synthetic construct
  misc_feature 1..20: note = Description of Artificial Sequence: Synthetic oligonucleotide
  misc_feature 1..20: note = Target: ANGPTL3; (-) strand; PAM type: YTN; PAM sequence: TTA
  source 1..20: mol_type = other DNA
taaattgttaatacaaaata

SEQ ID NO: 10901 - DNA, 20 bp, synthetic construct
  misc_feature 1..20: note = Description of Artificial Sequence: Synthetic oligonucleotide
  misc_feature 1..20: note = Target: ANGPTL3; (-) strand; PAM type: YTN; PAM sequence: TTC
  source 1..20: mol_type = other DNA
agtgtaaattataaattgtt

SEQ ID NO: 10902 - DNA, 20 bp, synthetic construct
  misc_feature 1..20: note = Description of Artificial Sequence: Synthetic oligonucleotide
  misc_feature 1..20: note = Target: ANGPTL3; (-) strand; PAM type: YTN; PAM sequence: TTT
  source 1..20: mol_type = other DNA
cagtgtaaattataaattgt

SEQ ID NO: 10903 - DNA, 20 bp, synthetic construct
  misc_feature 1..20: note = Description of Artificial Sequence: Synthetic oligonucleotide
  misc_feature 1..20: note = Target: ANGPTL3; (-) strand; PAM type: YTN; PAM sequence: TTA
  source 1..20: mol_type = other DNA
tcataataaatttcagtgta

SEQ ID NO: 10904 - DNA, 20 bp, synthetic construct
  misc_feature 1..20: note = Description of Artificial Sequence: Synthetic oligonucleotide
  misc_feature 1..20: note = Target: ANGPTL3; (-) strand; PAM type: YTN; PAM sequence: TTT
  source 1..20: mol_type = other DNA
atcataataaatttcagtgt

SEQ ID NO: 10905 - DNA, 20 bp, synthetic construct
  misc_feature 1..20: note = Description of Artificial Sequence: Synthetic oligonucleotide
  misc_feature 1..20: note = Target: ANGPTL3; (-) strand; PAM type: YTN; PAM sequence: TTT
  source 1..20: mol_type = other DNA
tatcataataaatttcagtg

SEQ ID NO: 10906 - DNA, 20 bp, synthetic construct
  misc_feature 1..20: note = Description of Artificial Sequence: Synthetic oligonucleotide
  misc_feature 1..20: note = Target: ANGPTL3; (-) strand; PAM type: YTN; PAM sequence: TTA
  source 1..20: mol_type = other DNA
acacagggaaaagttttatc

SEQ ID NO: 10907 - DNA, 20 bp, synthetic construct
  misc_feature 1..20: note = Description of Artificial Sequence: Synthetic oligonucleotide
  misc_feature 1..20: note = Target: ANGPTL3; (-) strand; PAM type: YTN; PAM sequence: TTT
  source 1..20: mol_type = other DNA
aacacagggaaaagttttat

SEQ ID NO: 10908 - DNA, 20 bp, synthetic construct
  misc_feature 1..20: note = Description of Artificial Sequence: Synthetic oligonucleotide
  misc_feature 1..20: note = Target: ANGPTL3; (-) strand; PAM type: YTN; PAM sequence: TTT
  source 1..20: mol_type = other DNA
taacacagggaaaagtttta

SEQ ID NO: 10909 - DNA, 20 bp, synthetic construct
  misc_feature 1..20: note = Description of Artificial Sequence: Synthetic oligonucleotide
  misc_feature 1..20: note = Target: ANGPTL3; (-) strand; PAM type: YTN; PAM sequence: TTT
  source 1..20: mol_type = other DNA
ttaacacagggaaaagtttt

SEQ ID NO: 10910 - DNA, 20 bp, synthetic construct
  misc_feature 1..20: note = Description of Artificial Sequence: Synthetic oligonucleotide
  misc_feature 1..20: note = Target: ANGPTL3; (-) strand; PAM type: YTN; PAM sequence: CTT
  source 1..20: mol_type = other DNA
tttaacacagggaaaagttt

SEQ ID NO: 10911 - DNA, 20 bp, synthetic construct
  misc_feature 1..20: note = Description of Artificial Sequence: Synthetic oligonucleotide
  misc_feature 1..20: note = Target: ANGPTL3; (-) strand; PAM type: YTN; PAM sequence: TTA
  source 1..20: mol_type = other DNA
atagctttttaacacaggga

SEQ ID NO: 10912 - DNA, 20 bp, synthetic construct
  misc_feature 1..20: note = Description of Artificial Sequence: Synthetic oligonucleotide
  misc_feature 1..20: note = Target: ANGPTL3; (-) strand; PAM type: YTN; PAM sequence: TTC
  source 1..20: mol_type = other DNA
ataaagttaatagcttttta

SEQ ID NO: 10913 - DNA, 20 bp, synthetic construct
  misc_feature 1..20: note = Description of Artificial Sequence: Synthetic oligonucleotide
  misc_feature 1..20: note = Target: ANGPTL3; (-) strand; PAM type: YTN; PAM sequence: TTT
  source 1..20: mol_type = other DNA
cataaagttaatagcttttt

SEQ ID NO: 10914 - DNA, 20 bp, synthetic construct
  misc_feature 1..20: note = Description of Artificial Sequence: Synthetic oligonucleotide
  misc_feature 1..20: note = Target: ANGPTL3; (-) strand; PAM type: YTN; PAM sequence: TTT
  source 1..20: mol_type = other DNA
tcataaagttaatagctttt

SEQ ID NO: 10915 - DNA, 20 bp, synthetic construct
  misc_feature 1..20: note = Description of Artificial Sequence: Synthetic oligonucleotide
  misc_feature 1..20: note = Target: ANGPTL3; (-) strand; PAM type: YTN; PAM sequence: TTT
  source 1..20: mol_type = other DNA
ttcataaagttaatagcttt

SEQ ID NO: 10916 - DNA, 20 bp, synthetic construct
  misc_feature 1..20: note = Description of Artificial Sequence: Synthetic oligonucleotide
  misc_feature 1..20: note = Target: ANGPTL3; (-) strand; PAM type: YTN; PAM sequence: CTA
  source 1..20: mol_type = other DNA
aaagaaatttttcataaagt

SEQ ID NO: 10917 - DNA, 20 bp, synthetic construct
  misc_feature 1..20: note = Description of Artificial Sequence: Synthetic oligonucleotide
  misc_feature 1..20: note = Target: ANGPTL3; (-) strand; PAM type: YTN; PAM sequence: TTA
  source 1..20: mol_type = other DNA
cctaaaagaaatttttcata

SEQ ID NO: 10918 - DNA, 20 bp, synthetic construct
  misc_feature 1..20: note = Description of Artificial Sequence: Synthetic oligonucleotide
  misc_feature 1..20: note = Target: ANGPTL3; (-) strand; PAM type: YTN; PAM sequence: CTT
  source 1..20: mol_type = other DNA
acctaaaagaaatttttcat

SEQ ID NO: 10919 - DNA, 20 bp, synthetic construct
  misc_feature 1..20: note = Description of Artificial Sequence: Synthetic oligonucleotide
  misc_feature 1..20: note = Target: ANGPTL3; (-) strand; PAM type: YTN; PAM sequence: CTG
  source 1..20: mol_type = other DNA
tgtatgtgtgtgggtatata

SEQ ID NO: 10920 - DNA, 20 bp, synthetic construct
  misc_feature 1..20: note = Description of Artificial Sequence: Synthetic oligonucleotide
  misc_feature 1..20: note = Target: ANGPTL3; (-) strand; PAM type: YTN; PAM sequence: TTA
  source 1..20: mol_type = other DNA
acctgtgtatgtgtgtgggt

SEQ ID NO: 10921 - DNA, 20 bp, synthetic construct
  misc_feature 1..20: note = Description of Artificial Sequence: Synthetic oligonucleotide
  misc_feature 1..20: note = Target: ANGPTL3; (-) strand; PAM type: YTN; PAM sequence: TTT
  source 1..20: mol_type = other DNA
aacctgtgtatgtgtgtggg

SEQ ID NO: 10922 - DNA, 20 bp, synthetic construct
  misc_feature 1..20: note = Description of Artificial Sequence: Synthetic oligonucleotide
  misc_feature 1..20: note = Target: ANGPTL3; (-) strand; PAM type: YTN; PAM sequence: TTT
  source 1..20: mol_type = other DNA
taacctgtgtatgtgtgtgg

SEQ ID NO: 10923 - DNA, 20 bp, synthetic construct
  misc_feature 1..20: note = Description of Artificial Sequence: Synthetic oligonucleotide
  misc_feature 1..20: note = Target: ANGPTL3; (-) strand; PAM type: YTN; PAM sequence: CTT
  source 1..20: mol_type = other DNA
ttaacctgtgtatgtgtgtg

SEQ ID NO: 10924 - DNA, 20 bp, synthetic construct
  misc_feature 1..20: note = Description of Artificial Sequence: Synthetic oligonucleotide
  misc_feature 1..20: note = Target: ANGPTL3; (-) strand; PAM type: YTN; PAM sequence: CTA
  source 1..20: mol_type = other DNA
acttttaacctgtgtatgtg

SEQ ID NO: 10925 - DNA, 20 bp, synthetic construct
  misc_feature 1..20: note = Description of Artificial Sequence: Synthetic oligonucleotide
  misc_feature 1..20: note = Target: ANGPTL3; (-) strand; PAM type: YTN; PAM sequence: TTA
  source 1..20: mol_type = other DNA
tgtcacatgaaactaacttt

SEQ ID NO: 10926 - DNA, 20 bp, synthetic construct
  misc_feature 1..20: note = Description of Artificial Sequence: Synthetic oligonucleotide
  misc_feature 1..20: note = Target: ANGPTL3; (-) strand; PAM type: YTN; PAM sequence: TTA
  source 1..20: mol_type = other DNA
ttatgtcacatgaaactaac

SEQ ID NO: 10927 - DNA, 20 bp, synthetic construct
  misc_feature 1..20: note = Description of Artificial Sequence: Synthetic oligonucleotide
  misc_feature 1..20: note = Target: ANGPTL3; (-) strand; PAM type: YTN; PAM sequence: CTA
  source 1..20: mol_type = other DNA
gttattatgtcacatgaaac

SEQ ID NO: 10928 - DNA, 20 bp, synthetic construct
  misc_feature 1..20: note = Description of Artificial Sequence: Synthetic oligonucleotide
  misc_feature 1..20: note = Target: ANGPTL3; (-) strand; PAM type: YTN; PAM sequence: CTC
  source 1..20: mol_type = other DNA
aaaatgctagttattatgtc

SEQ ID NO: 10929 - DNA, 20 bp, synthetic construct
  misc_feature 1..20: note = Description of Artificial Sequence: Synthetic oligonucleotide
  misc_feature 1..20: note = Target: ANGPTL3; (-) strand; PAM type: YTN; PAM sequence: CTG
  source 1..20: mol_type = other DNA
ggcaaacaggtagtgctcaa

SEQ ID NO: 10930 - DNA, 20 bp, synthetic construct
  misc_feature 1..20: note = Description of Artificial Sequence: Synthetic oligonucleotide
  misc_feature 1..20: note = Target: ANGPTL3; (-) strand; PAM type: YTN; PAM sequence: TTA
  source 1..20: mol_type = other DNA
gaacagtgctgggcaaacag

SEQ ID NO: 10931 - DNA, 20 bp, synthetic construct
  misc_feature 1..20: note = Description of Artificial Sequence: Synthetic oligonucleotide
  misc_feature 1..20: note = Target: ANGPTL3; (-) strand; PAM type: YTN; PAM sequence: CTT
  source 1..20: mol_type = other DNA
agaacagtgctgggcaaaca

SEQ ID NO: 10932 - DNA, 20 bp, synthetic construct
  misc_feature 1..20: note = Description of Artificial Sequence: Synthetic oligonucleotide
  misc_feature 1..20: note = Target: ANGPTL3; (-) strand; PAM type: YTN; PAM sequence: TTA
  source 1..20: mol_type = other DNA
acaataatacatgtagagca

SEQ ID NO: 10933 - DNA, 20 bp, synthetic construct
  misc_feature 1..20: note = Description of Artificial Sequence: Synthetic oligonucleotide
  misc_feature 1..20: note = Target: ANGPTL3; (-) strand; PAM type: YTN; PAM sequence: TTT
  source 1..20: mol_type = other DNA
aacaataatacatgtagagc

SEQ ID NO: 10934 - DNA, 20 bp, synthetic construct
  misc_feature 1..20: note = Description of Artificial Sequence: Synthetic oligonucleotide
  misc_feature 1..20: note = Target: ANGPTL3; (-) strand; PAM type: YTN; PAM sequence: TTA
  source 1..20: mol_type = other DNA
tgataatttaacaataatac

SEQ ID NO: 10935 - DNA, 20 bp, synthetic construct
  misc_feature 1..20: note = Description of Artificial Sequence: Synthetic oligonucleotide
  misc_feature 1..20: note = Target: ANGPTL3; (-) strand; PAM type: YTN; PAM sequence: TTC
  source 1..20: mol_type = other DNA
atagtgttatgataatttaa

SEQ ID NO: 10936 - DNA, 20 bp, synthetic construct
  misc_feature 1..20: note = Description of Artificial Sequence: Synthetic oligonucleotide
  misc_feature 1..20: note = Target: ANGPTL3; (-) strand; PAM type: YTN; PAM sequence: TTA
  source 1..20: mol_type = other DNA
tagtacataattcatagtgt

SEQ ID NO: 10937 - DNA, 20 bp, synthetic construct
  misc_feature 1..20: note = Description of Artificial Sequence: Synthetic oligonucleotide
  misc_feature 1..20: note = Target: ANGPTL3; (-) strand; PAM type: YTN; PAM sequence: CTG
  source 1..20: mol_type = other DNA
gggtaattatagtacataat

SEQ ID NO: 10938 - DNA, 20 bp, synthetic construct
  misc_feature 1..20: note = Description of Artificial Sequence: Synthetic oligonucleotide
  misc_feature 1..20: note = Target: ANGPTL3; (-) strand; PAM type: YTN; PAM sequence: CTG
  source 1..20: mol_type = other DNA
taaagctggggtaattatag

SEQ ID NO: 10939 - DNA, 20 bp, synthetic construct
  misc_feature 1..20: note = Description of Artificial Sequence: Synthetic oligonucleotide
  misc_feature 1..20: note = Target: ANGPTL3; (-) strand; PAM type: YTN; PAM sequence: CTC
  source 1..20: mol_type = other DNA
atctgtaaagctggggtaat

SEQ ID NO: 10940 - DNA, 20 bp, synthetic construct
  misc_feature 1..20: note = Description of Artificial Sequence: Synthetic oligonucleotide
  misc_feature 1..20: note = Target: ANGPTL3; (-) strand; PAM type: YTN; PAM sequence: CTC
  source 1..20: mol_type = other DNA
ctcatctgtaaagctggggt

SEQ ID NO: 10941 - DNA, 20 bp, synthetic construct
  misc_feature 1..20: note = Description of Artificial Sequence: Synthetic oligonucleotide
  misc_feature 1..20: note = Target: ANGPTL3; (-) strand; PAM type: YTN; PAM sequence: TTA
  source 1..20: mol_type = other DNA
gtctcctcatctgtaaagct

SEQ ID NO: 10942 - DNA, 20 bp, synthetic construct
  misc_feature 1..20: note = Description of Artificial Sequence: Synthetic oligonucleotide
  misc_feature 1..20: note = Target: ANGPTL3; (-) strand; PAM type: YTN; PAM sequence: CTC
  source 1..20: mol_type = other DNA
cccatggattagtctcctca

SEQ ID NO: 10943 - DNA, 20 bp, synthetic construct
  misc_feature 1..20: note = Description of Artificial Sequence: Synthetic oligonucleotide
  misc_feature 1..20: note = Target: ANGPTL3; (-) strand; PAM type: YTN; PAM sequence: TTA
  source 1..20: mol_type = other DNA
acctccccatggattagtct

SEQ ID NO: 10944 - DNA, 20 bp, synthetic construct
  misc_feature 1..20: note = Description of Artificial Sequence: Synthetic oligonucleotide
  misc_feature 1..20: note = Target: ANGPTL3; (-) strand; PAM type: YTN; PAM sequence: CTT
  source 1..20: mol_type = other DNA
aacctccccatggattagtc

SEQ ID NO: 10945 - DNA, 20 bp, synthetic construct
  misc_feature 1..20: note = Description of Artificial Sequence: Synthetic oligonucleotide
  misc_feature 1..20: note = Target: ANGPTL3; (-) strand; PAM type: YTN; PAM sequence: TTA
  source 1..20: mol_type = other DNA
cttaacctccccatggatta

SEQ ID NO: 10946 - DNA, 20 bp, synthetic construct
  misc_feature 1..20: note = Description of Artificial Sequence: Synthetic oligonucleotide
  misc_feature 1..20: note = Target: ANGPTL3; (-) strand; PAM type: YTN; PAM sequence: TTG
  source 1..20: mol_type = other DNA
gacaagttacttaacctccc

SEQ ID NO: 10947 - DNA, 20 bp, synthetic construct
  misc_feature 1..20: note = Description of Artificial Sequence: Synthetic oligonucleotide
  misc_feature 1..20: note = Target: ANGPTL3; (-) strand; PAM type: YTN; PAM sequence: CTT
  source 1..20: mol_type = other DNA
ggacaagttacttaacctcc

SEQ ID NO: 10948 - DNA, 20 bp, synthetic construct
  misc_feature 1..20: note = Description of Artificial Sequence: Synthetic oligonucleotide
  misc_feature 1..20: note = Target: ANGPTL3; (-) strand; PAM type: YTN; PAM sequence: CTG
  source 1..20: mol_type = other DNA
gccttggacaagttacttaa

SEQ ID NO: 10949 - DNA, 20 bp, synthetic construct
  misc_feature 1..20: note = Description of Artificial Sequence: Synthetic oligonucleotide
  misc_feature 1..20: note = Target: ANGPTL3; (-) strand; PAM type: YTN; PAM sequence: CTG
  source 1..20: mol_type = other DNA
tctggccttggacaagttac

SEQ ID NO: 10950 - DNA, 20 bp, synthetic construct
  misc_feature 1..20: note = Description of Artificial Sequence: Synthetic oligonucleotide
  misc_feature 1..20: note = Target: ANGPTL3; (-) strand; PAM type: YTN; PAM sequence: CTA
  source 1..20: mol_type = other DNA
gctgtctggccttggacaag

SEQ ID NO: 10951 - DNA, 20 bp, synthetic construct
  misc_feature 1..20: note = Description of Artificial Sequence: Synthetic oligonucleotide
  misc_feature 1..20: note = Target: ANGPTL3; (-) strand; PAM type: YTN; PAM sequence: CTC
  source 1..20: mol_type = other DNA
tagctgtctggccttggaca

SEQ ID NO: 10952 - DNA, 20 bp, synthetic construct
  misc_feature 1..20: note = Description of Artificial Sequence: Synthetic oligonucleotide
  misc_feature 1..20: note = Target: ANGPTL3; (-) strand; PAM type: YTN; PAM sequence: CTG
  source 1..20: mol_type = other DNA
tggtgtgggtccaaaagccg

SEQ ID NO: 10953 - DNA, 20 bp, synthetic construct
  misc_feature 1..20: note = Description of Artificial Sequence: Synthetic oligonucleotide
  misc_feature 1..20: note = Target: ANGPTL3; (-) strand; PAM type: YTN; PAM sequence: CTG
  source 1..20: mol_type = other DNA
gagtcagactgtggtgtggg

SEQ ID NO: 10954 - DNA, 20 bp, synthetic construct
  misc_feature 1..20: note = Description of Artificial Sequence: Synthetic oligonucleotide
  misc_feature 1..20: note = Target: ANGPTL3; (-) strand; PAM type: YTN; PAM sequence: TTA
  source 1..20: mol_type = other DNA
agaatatgggtgctggagtc

SEQ ID NO: 10955 - DNA, 20 bp, synthetic construct
  misc_feature 1..20: note = Description of Artificial Sequence: Synthetic oligonucleotide
  misc_feature 1..20: note = Target: ANGPTL3; (-) strand; PAM type: YTN; PAM sequence: TTG
  source 1..20: mol_type = other DNA
ttaagaatatgggtgctgga

SEQ ID NO: 10956 - DNA, 20 bp, synthetic construct
  misc_feature 1..20: note = Description of Artificial Sequence: Synthetic oligonucleotide
  misc_feature 1..20: note = Target: ANGPTL3; (-) strand; PAM type: YTN; PAM sequence: TTA
  source 1..20: mol_type = other DNA
atatggtgaaattgttaaga

SEQ ID NO: 10957 - DNA, 20 bp, synthetic construct
  misc_feature 1..20: note = Description of Artificial Sequence: Synthetic oligonucleotide
  misc_feature 1..20: note = Target: ANGPTL3; (-) strand; PAM type: YTN; PAM sequence: TTG
  source 1..20: mol_type = other DNA
acatattaatatggtgaaat

SEQ ID NO: 10958 - DNA, 20 bp, synthetic construct
  misc_feature 1..20: note = Description of Artificial Sequence: Synthetic oligonucleotide
  misc_feature 1..20: note = Target: ANGPTL3; (-) strand; PAM type: YTN; PAM sequence: CTT
  source 1..20: mol_type = other DNA
gacatattaatatggtgaaa

SEQ ID NO: 10959 - DNA, 20 bp, synthetic construct
  misc_feature 1..20: note = Description of Artificial Sequence: Synthetic oligonucleotide
  misc_feature 1..20: note = Target: ANGPTL3; (-) strand; PAM type: YTN; PAM sequence: TTA
  source 1..20: mol_type = other DNA
atcttgacatattaatatgg

SEQ ID NO: 10960 - DNA, 20 bp, synthetic construct
  misc_feature 1..20: note = Description of Artificial Sequence: Synthetic oligonucleotide
  misc_feature 1..20: note = Target: ANGPTL3; (-) strand; PAM type: YTN; PAM sequence: CTT
  source 1..20: mol_type = other DNA
aatcttgacatattaatatg

SEQ ID NO: 10961 - DNA, 20 bp, synthetic construct
  misc_feature 1..20: note = Description of Artificial Sequence: Synthetic oligonucleotide
  misc_feature 1..20: note = Target: ANGPTL3; (-) strand; PAM type: YTN; PAM sequence: CTG
  source 1..20: mol_type = other DNA
cttaatcttgacatattaat

SEQ ID NO: 10962 - DNA, 20 bp, synthetic construct
  misc_feature 1..20: note = Description of Artificial Sequence: Synthetic oligonucleotide
  misc_feature 1..20: note = Target: ANGPTL3; (-) strand; PAM type: YTN; PAM sequence: TTA
  source 1..20: mol_type = other DNA
aaactgcttaatcttgacat

SEQ ID NO: 10963 - DNA, 20 bp, synthetic construct
  misc_feature 1..20: note = Description of Artificial Sequence: Synthetic oligonucleotide
  misc_feature 1..20: note = Target: ANGPTL3; (-) strand; PAM type: YTN; PAM sequence: TTT
  source 1..20: mol_type = other DNA
aaaactgcttaatcttgaca

SEQ ID NO: 10964 - DNA, 20 bp, synthetic construct
  misc_feature 1..20: note = Description of Artificial Sequence: Synthetic oligonucleotide
  misc_feature 1..20: note = Target: ANGPTL3; (-) strand; PAM type: YTN; PAM sequence: CTT
  source 1..20: mol_type = other DNA
taaaactgcttaatcttgac

SEQ ID NO: 10965 - DNA, 20 bp, synthetic construct
  misc_feature 1..20: note = Description of Artificial Sequence: Synthetic oligonucleotide
  misc_feature 1..20: note = Target: ANGPTL3; (-) strand; PAM type: YTN; PAM sequence: TTG
  source 1..20: mol_type = other DNA
tgagaaaatagcatccttta

SEQ ID NO: 10966 - DNA, 20 bp, synthetic construct
  misc_feature 1..20: note = Description of Artificial Sequence: Synthetic oligonucleotide
  misc_feature 1..20: note = Target: ANGPTL3; (-) strand; PAM type: YTN; PAM sequence: TTT
  source 1..20: mol_type = other DNA
gtgagaaaatagcatccttt

SEQ ID NO: 10967 - DNA, 20 bp, synthetic construct
  misc_feature 1..20: note = Description of Artificial Sequence: Synthetic oligonucleotide
  misc_feature 1..20: note = Target: ANGPTL3; (-) strand; PAM type: YTN; PAM sequence: TTA
  source 1..20: mol_type = other DNA
agaaatttgtgagaaaatag

SEQ ID NO: 10968 - DNA, 20 bp, synthetic construct
  misc_feature 1..20: note = Description of Artificial Sequence: Synthetic oligonucleotide
  misc_feature 1..20: note = Target: ANGPTL3; (-) strand; PAM type: YTN; PAM sequence: TTC
  source 1..20: mol_type = other DNA
atattaagaaatttgtgaga

SEQ ID NO: 10969 - DNA, 20 bp, synthetic construct
  misc_feature 1..20: note = Description of Artificial Sequence: Synthetic oligonucleotide
  misc_feature 1..20: note = Target: ANGPTL3; (-) strand; PAM type: YTN; PAM sequence: TTG
  source 1..20: mol_type = other DNA
agtgttcatattaagaaatt

SEQ ID NO: 10970 - DNA, 20 bp, synthetic construct
  misc_feature 1..20: note = Description of Artificial Sequence: Synthetic oligonucleotide
  misc_feature 1..20: note = Target: ANGPTL3; (-) strand; PAM type: YTN; PAM sequence: TTA
  source 1..20: mol_type = other DNA
ttgagtgttcatattaagaa

SEQ ID NO: 10971 - DNA, 20 bp, synthetic construct
  misc_feature 1..20: note = Description of Artificial Sequence: Synthetic oligonucleotide
  misc_feature 1..20: note = Target: ANGPTL3; (-) strand; PAM type: YTN; PAM sequence: CTT
  source 1..20: mol_type = other DNA
attgagtgttcatattaaga

SEQ ID NO: 10972 - DNA, 20 bp, synthetic construct
  misc_feature 1..20: note = Description of Artificial Sequence: Synthetic oligonucleotide
  misc_feature 1..20: note = Target: ANGPTL3; (-) strand; PAM type: YTN; PAM sequence: TTC
  source 1..20: mol_type = other DNA
ttattgagtgttcatattaa

SEQ ID NO: 10973 - DNA, 20 bp, synthetic construct
  misc_feature 1..20: note = Description of Artificial Sequence: Synthetic oligonucleotide
  misc_feature 1..20: note = Target: ANGPTL3; (-) strand; PAM type: YTN; PAM sequence: TTA
  source 1..20: mol_type = other DNA
ttcttattgagtgttcatat

SEQ ID NO: 10974 - DNA, 20 bp, synthetic construct
  misc_feature 1..20: note = Description of Artificial Sequence: Synthetic oligonucleotide
  misc_feature 1..20: note = Target: ANGPTL3; (-) strand; PAM type: YTN; PAM sequence: TTA
  source 1..20: mol_type = other DNA
gtgattattcttattgagtg

SEQ ID NO: 10975 - DNA, 20 bp, synthetic construct
  misc_feature 1..20: note = Description of Artificial Sequence: Synthetic oligonucleotide
  misc_feature 1..20: note = Target: ANGPTL3; (-) strand; PAM type: YTN; PAM sequence: TTA
  source 1..20: mol_type = other DNA
tattagtgattattcttatt

SEQ ID NO: 10976 - DNA, 20 bp, synthetic construct
  misc_feature 1..20: note = Description of Artificial Sequence: Synthetic oligonucleotide
  misc_feature 1..20: note = Target: ANGPTL3; (-) strand; PAM type: YTN; PAM sequence: CTT
  source 1..20: mol_type = other DNA
atattagtgattattcttat

SEQ ID NO: 10977 - DNA, 20 bp, synthetic construct
  misc_feature 1..20: note = Description of Artificial Sequence: Synthetic oligonucleotide
  misc_feature 1..20: note = Target: ANGPTL3; (-) strand; PAM type: YTN; PAM sequence: CTA
  source 1..20: mol_type = other DNA
aatgcttatattagtgatta

SEQ ID NO: 10978 - DNA, 20 bp, synthetic construct
  misc_feature 1..20: note = Description of Artificial Sequence: Synthetic oligonucleotide
  misc_feature 1..20: note = Target: ANGPTL3; (-) strand; PAM type: YTN; PAM sequence: TTA
  source 1..20: mol_type = other DNA
aaaaaatactaaatgcttat

SEQ ID NO: 10979 - DNA, 20 bp, synthetic construct
  misc_feature 1..20: note = Description of Artificial Sequence: Synthetic oligonucleotide
  misc_feature 1..20: note = Target: ANGPTL3; (-) strand; PAM type: YTN; PAM sequence: TTA
  source 1..20: mol_type = other DNA
gtgttaaaaaaatactaaat

SEQ ID NO: 10980 - DNA, 20 bp, synthetic construct
  misc_feature 1..20: note = Description of Artificial Sequence: Synthetic oligonucleotide
  misc_feature 1..20: note = Target: ANGPTL3; (-) strand; PAM type: YTN; PAM sequence: CTT
  source 1..20: mol_type = other DNA
agtgttaaaaaaatactaaa

SEQ ID NO: 10981 - DNA, 20 bp, synthetic construct
  misc_feature 1..20: note = Description of Artificial Sequence: Synthetic oligonucleotide
  misc_feature 1..20: note = Target: ANGPTL3; (-) strand; PAM type: YTN; PAM sequence: TTC
  source 1..20: mol_type = other DNA
caacttagtgttaaaaaaat

SEQ ID NO: 10982 - DNA, 20 bp, synthetic construct
  misc_feature 1..20: note = Description of Artificial Sequence: Synthetic oligonucleotide
  misc_feature 1..20: note = Target: ANGPTL3; (-) strand; PAM type: YTN; PAM sequence: CTT
  source 1..20: mol_type = other DNA
ccaacttagtgttaaaaaaa

SEQ ID NO: 10983 - DNA, 20 bp, synthetic construct
  misc_feature 1..20: note = Description of Artificial Sequence: Synthetic oligonucleotide
  misc_feature 1..20: note = Target: ANGPTL3; (-) strand; PAM type: YTN; PAM sequence: CTA
  source 1..20: mol_type = other DNA
tgcttccaacttagtgttaa

SEQ ID NO: 10984 - DNA, 20 bp, synthetic construct
  misc_feature 1..20: note = Description of Artificial Sequence: Synthetic oligonucleotide
  misc_feature 1..20: note = Target: ANGPTL3; (-) strand; PAM type: YTN; PAM sequence: TTC
  source 1..20: mol_type = other DNA
cactatgcttccaacttagt

SEQ ID NO: 10985 - DNA, 20 bp, synthetic construct
  misc_feature 1..20: note = Description of Artificial Sequence: Synthetic oligonucleotide
  misc_feature 1..20: note = Target: ANGPTL3; (-) strand; PAM type: YTN; PAM sequence: CTA
  source 1..20: mol_type = other DNA
aaaataaatgttccactatg

SEQ ID NO: 10986 - DNA, 20 bp, synthetic construct
  misc_feature 1..20: note = Description of Artificial Sequence: Synthetic oligonucleotide
  misc_feature 1..20: note = Target: ANGPTL3; (-) strand; PAM type: YTN; PAM sequence: TTC
  source 1..20: mol_type = other DNA
taaaaataaatgttccacta

SEQ ID NO: 10987 - DNA, 20 bp, synthetic construct
  misc_feature 1..20: note = Description of Artificial Sequence: Synthetic oligonucleotide
  misc_feature 1..20: note = Target: ANGPTL3; (-) strand; PAM type: YTN; PAM sequence: TTT
  source 1..20: mol_type = other DNA
ctaaaaataaatgttccact

SEQ ID NO: 10988 - DNA, 20 bp, synthetic construct
  misc_feature 1..20: note = Description of Artificial Sequence: Synthetic oligonucleotide
  misc_feature 1..20: note = Target: ANGPTL3; (-) strand; PAM type: YTN; PAM sequence: TTA
  source 1..20: mol_type = other DNA
ataatatttctaaaaataaa

SEQ ID NO: 10989 - DNA, 20 bp, synthetic construct
  misc_feature 1..20: note = Description of Artificial Sequence: Synthetic oligonucleotide
  misc_feature 1..20: note = Target: ANGPTL3; (-) strand; PAM type: YTN; PAM sequence: TTA
  source 1..20: mol_type = other DNA
caagcgtgagcccagccaat

SEQ ID NO: 10990 - DNA, 20 bp, synthetic construct
  misc_feature 1..20: note = Description of Artificial Sequence: Synthetic oligonucleotide
  misc_feature 1..20: note = Target: ANGPTL3; (-) strand; PAM type: YTN; PAM sequence: TTA
  source 1..20: mol_type = other DNA
caggcatgagcccagccgat

SEQ ID NO: 10991 - DNA, 20 bp, synthetic construct
  misc_feature 1..20: note = Description of Artificial Sequence: Synthetic oligonucleotide
  misc_feature 1..20: note = Target: ANGPTL3; (-) strand; PAM type: YTN; PAM sequence: TTT
  source 1..20: mol_type = other DNA
acaggcatgagcccagccga

SEQ ID NO: 10992 - DNA, 20 bp, synthetic construct
  misc_feature 1..20: note = Description of Artificial Sequence: Synthetic oligonucleotide
  misc_feature 1..20: note = Target: ANGPTL3; (-) strand; PAM type: YTN; PAM sequence: CTC
  source 1..20: mol_type = other DNA
ccaaaatttacaggcatgag

SEQ ID NO: 10993 - DNA, 20 bp, synthetic construct
  misc_feature 1..20: note = Description of Artificial Sequence: Synthetic oligonucleotide
  misc_feature 1..20: note = Target: ANGPTL3; (-) strand; PAM type: YTN; PAM sequence: TTG
  source 1..20: mol_type = other DNA
gcctcccaaaatttacaggc

SEQ ID NO: 10994 - DNA, 20 bp, synthetic construct
  misc_feature 1..20: note = Description of Artificial Sequence: Synthetic oligonucleotide
  misc_feature 1..20: note = Target: ANGPTL3; (-) strand; PAM type: YTN; PAM sequence: CTT
  source 1..20: mol_type = other DNA
ggcctcccaaaatttacagg

SEQ ID NO: 10995 - DNA, 20 bp, synthetic construct
  misc_feature 1..20: note = Description of Artificial Sequence: Synthetic oligonucleotide
  misc_feature 1..20: note = Target: ANGPTL3; (-) strand; PAM type: YTN; PAM sequence: TTA
  source 1..20: mol_type = other DNA
ccttggcctcccaaaattta

SEQ ID NO: 10996 - DNA, 20 bp, synthetic construct
  misc_feature 1..20: note = Description of Artificial Sequence: Synthetic oligonucleotide
  misc_feature 1..20: note = Target: ANGPTL3; (-) strand; PAM type: YTN; PAM sequence: TTT
  source 1..20: mol_type = other DNA
accttggcctcccaaaattt

SEQ ID NO: 10997 - DNA, 20 bp, synthetic construct
  misc_feature 1..20: note = Description of Artificial Sequence: Synthetic oligonucleotide
  misc_feature 1..20: note = Target: ANGPTL3; (-) strand; PAM type: YTN; PAM sequence: TTT
  source 1..20: mol_type = other DNA
taccttggcctcccaaaatt

SEQ ID NO: 10998 - DNA, 20 bp, synthetic construct
  misc_feature 1..20: note = Description of Artificial Sequence: Synthetic oligonucleotide
  misc_feature 1..20: note = Target: ANGPTL3; (-) strand; PAM type: YTN; PAM sequence: CTT
  source 1..20: mol_type = other DNA
ttaccttggcctcccaaaat

SEQ ID NO: 10999 - DNA, 20 bp, synthetic construct
  misc_feature 1..20: note = Description of Artificial Sequence: Synthetic oligonucleotide
  misc_feature 1..20: note = Target: ANGPTL3; (-) strand; PAM type: YTN; PAM sequence: TTC
  source 1..20: mol_type = other DNA
ttttaccttggcctcccaaa

SEQ ID NO: 11000 - DNA, 20 bp, synthetic construct
  misc_feature 1..20: note = Description of Artificial Sequence: Synthetic oligonucleotide
  misc_feature 1..20: note = Target: ANGPTL3; (-) strand; PAM type: YTN; PAM sequence: CTC
  source 1..20: mol_type = other DNA
aagcaattcttttaccttgg

SEQ ID NO: 11001 - DNA, 20 bp, synthetic construct
  misc_feature 1..20: note = Description of Artificial Sequence: Synthetic oligonucleotide
  misc_feature 1..20: note = Target: ANGPTL3; (-) strand; PAM type: YTN; PAM sequence: CTG
  source 1..20: mol_type = other DNA
ggctcaagcaattcttttac

SEQ ID NO: 11002 - DNA, 20 bp, synthetic construct
  misc_feature 1..20: note = Description of Artificial Sequence: Synthetic oligonucleotide
  misc_feature 1..20: note = Target: ANGPTL3; (-) strand; PAM type: YTN; PAM sequence: CTG
  source 1..20: mol_type = other DNA
gaaatactgggctcaagcaa

SEQ ID NO: 11003 - DNA, 20 bp, synthetic construct
  misc_feature 1..20: note = Description of Artificial Sequence: Synthetic oligonucleotide
  misc_feature 1..20: note = Target: ANGPTL3; (-) strand; PAM type: YTN; PAM sequence: CTG
  source 1..20: mol_type = other DNA
gtctggaaatactgggctca

SEQ ID NO: 11004 - DNA, 20 bp, synthetic construct
  misc_feature 1..20: note = Description of Artificial Sequence: Synthetic oligonucleotide
  misc_feature 1..20: note = Target: ANGPTL3; (-) strand; PAM type: YTN; PAM sequence: TTG
  source 1..20: mol_type = other DNA
cccatgctggtctggaaata

SEQ ID NO: 11005 - DNA, 20 bp, synthetic construct
  misc_feature 1..20: note = Description of Artificial Sequence: Synthetic oligonucleotide
  misc_feature 1..20: note = Target: ANGPTL3; (-) strand; PAM type: YTN; PAM sequence: TTA
  source 1..20: mol_type = other DNA
atgtattgcccatgctggtc

SEQ ID NO: 11006 - DNA, 20 bp, synthetic construct
  misc_feature 1..20: note = Description of Artificial Sequence: Synthetic oligonucleotide
  misc_feature 1..20: note = Target: ANGPTL3; (-) strand; PAM type: YTN; PAM sequence: CTT
  source 1..20: mol_type = other DNA
aatgtattgcccatgctggt

SEQ ID NO: 11007 - DNA, 20 bp, synthetic construct
  misc_feature 1..20: note = Description of Artificial Sequence: Synthetic oligonucleotide
  misc_feature 1..20: note = Target: ANGPTL3; (-) strand; PAM type: YTN; PAM sequence: TTA
  source 1..20: mol_type = other DNA
aagatgatgtcttaatgtat

SEQ ID NO: 11008 - DNA, 20 bp, synthetic construct
  misc_feature 1..20: note = Description of Artificial Sequence: Synthetic oligonucleotide
  misc_feature 1..20: note = Target: ANGPTL3; (-) strand; PAM type: YTN; PAM sequence: TTT
  source 1..20: mol_type = other DNA
aaagatgatgtcttaatgta

SEQ ID NO: 11009 - DNA, 20 bp, synthetic construct
  misc_feature 1..20: note = Description of Artificial Sequence: Synthetic oligonucleotide
  misc_feature 1..20: note = Target: ANGPTL3; (-) strand; PAM type: YTN; PAM sequence: TTT
  source 1..20: mol_type = other DNA
taaagatgatgtcttaatgt

SEQ ID NO: 11010 - DNA, 20 bp, synthetic construct
  misc_feature 1..20: note = Description of Artificial Sequence: Synthetic oligonucleotide
  misc_feature 1..20: note = Target: ANGPTL3; (-) strand; PAM type: YTN; PAM sequence: TTT
  source 1..20: mol_type = other DNA
ttaaagatgatgtcttaatg

SEQ ID NO: 11011 - DNA, 20 bp, synthetic construct
  misc_feature 1..20: note = Description of Artificial Sequence: Synthetic oligonucleotide
  misc_feature 1..20: note = Target: ANGPTL3; (-) strand; PAM type: YTN; PAM sequence: TTT
  source 1..20: mol_type = other DNA
tttaaagatgatgtcttaat

SEQ ID NO: 11012 - DNA, 20 bp, synthetic construct
  misc_feature 1..20: note = Description of Artificial Sequence: Synthetic oligonucleotide
  misc_feature 1..20: note = Target: ANGPTL3; (-) strand; PAM type: YTN; PAM sequence: TTT
  source 1..20: mol_type = other DNA
ttttaaagatgatgtcttaa

SEQ ID NO: 11013 - DNA, 20 bp, synthetic construct
  misc_feature 1..20: note = Description of Artificial Sequence: Synthetic oligonucleotide
  misc_feature 1..20: note = Target: ANGPTL3; (-) strand; PAM type: YTN; PAM sequence: TTT
  source 1..20: mol_type = other DNA
tttttaaagatgatgtctta

SEQ ID NO: 11014 - DNA, 20 bp, synthetic construct
  misc_feature 1..20: note = Description of Artificial Sequence: Synthetic oligonucleotide
  misc_feature 1..20: note = Target: ANGPTL3; (-) strand; PAM type: YTN; PAM sequence: TTT
  source 1..20: mol_type = other DNA
ttttttaaagatgatgtctt

SEQ ID NO: 11015 - DNA, 20 bp, synthetic construct
  misc_feature 1..20: note = Description of Artificial Sequence: Synthetic oligonucleotide
  misc_feature 1..20: note = Target: ANGPTL3; (-) strand; PAM type: YTN; PAM sequence: TTT
  source 1..20: mol_type = other DNA
tttttttaaagatgatgtct

SEQ ID NO: 11016 - DNA, 20 bp, synthetic construct
  misc_feature 1..20: note = Description of Artificial Sequence: Synthetic oligonucleotide
  misc_feature 1..20: note = Target: ANGPTL3; (-) strand; PAM type: YTN; PAM sequence: TTA
  source 1..20: mol_type = other DNA
ataacattttttttttaaag

SEQ ID NO: 11017 - DNA, 20 bp, synthetic construct
  misc_feature 1..20: note = Description of Artificial Sequence: Synthetic oligonucleotide
  misc_feature 1..20: note = Target: ANGPTL3; (-) strand; PAM type: YTN; PAM sequence: TTA
  source 1..20: mol_type = other DNA
acaaaaagaggagattaata

SEQ ID NO: 11018 - DNA, 20 bp, synthetic construct
  misc_feature 1..20: note = Description of Artificial Sequence: Synthetic oligonucleotide
  misc_feature 1..20: note = Target: ANGPTL3; (-) strand; PAM type: YTN; PAM sequence: TTT
  source 1..20: mol_type = other DNA
aacaaaaagaggagattaat

SEQ ID NO: 11019 - DNA, 20 bp, synthetic construct
  misc_feature 1..20: note = Description of Artificial Sequence: Synthetic oligonucleotide
  misc_feature 1..20: note = Target: ANGPTL3; (-) strand; PAM type: YTN; PAM sequence: TTG
  source 1..20: mol_type = other DNA
ataatatacatttaacaaaa

SEQ ID NO: 11020 - DNA, 20 bp, synthetic construct
  misc_feature 1..20: note = Description of Artificial Sequence: Synthetic oligonucleotide
  misc_feature 1..20: note = Target: ANGPTL3; (-) strand; PAM type: YTN; PAM sequence: TTT
  source 1..20: mol_type = other DNA
gataatatacatttaacaaa

SEQ ID NO: 11021 - DNA, 20 bp, synthetic construct
  misc_feature 1..20: note = Description of Artificial Sequence: Synthetic oligonucleotide
  misc_feature 1..20: note = Target: ANGPTL3; (-) strand; PAM type: YTN; PAM sequence: TTT
  source 1..20: mol_type = other DNA
tgataatatacatttaacaa

SEQ ID NO: 11022 - DNA, 20 bp, synthetic construct
  misc_feature 1..20: note = Description of Artificial Sequence: Synthetic oligonucleotide
  misc_feature 1..20: note = Target: ANGPTL3; (-) strand; PAM type: YTN; PAM sequence: TTA
  source 1..20: mol_type = other DNA
gtaacaattttgataatata

SEQ ID NO: 11023 - DNA, 20 bp, synthetic construct
  misc_feature 1..20: note = Description of Artificial Sequence: Synthetic oligonucleotide
  misc_feature 1..20: note = Target: ANGPTL3; (-) strand; PAM type: YTN; PAM sequence: CTT
  source 1..20: mol_type = other DNA
agtaacaattttgataatat

SEQ ID NO: 11024 - DNA, 20 bp, synthetic construct
  misc_feature 1..20: note = Description of Artificial Sequence: Synthetic oligonucleotide
  misc_feature 1..20: note = Target: ANGPTL3; (-) strand; PAM type: YTN; PAM sequence: TTA
  source 1..20: mol_type = other DNA
gcttagtaacaattttgata

SEQ ID NO: 11025 - DNA, 20 bp, synthetic construct
  misc_feature 1..20: note = Description of Artificial Sequence: Synthetic oligonucleotide
  misc_feature 1..20: note = Target: ANGPTL3; (-) strand; PAM type: YTN; PAM sequence: TTG
  source 1..20: mol_type = other DNA
ttagcttagtaacaattttg

SEQ ID NO: 11026 - DNA, 20 bp, synthetic construct
  misc_feature 1..20: note = Description of Artificial Sequence: Synthetic oligonucleotide
  misc_feature 1..20: note = Target: ANGPTL3; (-) strand; PAM type: YTN; PAM sequence: TTT
  source 1..20: mol_type = other DNA
gttagcttagtaacaatttt

SEQ ID NO: 11027 - DNA, 20 bp, synthetic construct
  misc_feature 1..20: note = Description of Artificial Sequence: Synthetic oligonucleotide
  misc_feature 1..20: note = Target: ANGPTL3; (-) strand; PAM type: YTN; PAM sequence: CTG
  source 1..20: mol_type = other DNA
aagtttgttagcttagtaac

SEQ ID NO: 11028 - DNA, 20 bp, synthetic construct
  misc_feature 1..20: note = Description of Artificial Sequence: Synthetic oligonucleotide
  misc_feature 1..20: note = Target: ANGPTL3; (-) strand; PAM type: YTN; PAM sequence: TTC
  source 1..20: mol_type = other DNA
tgaagtttgttagcttagta

SEQ ID NO: 11029 - DNA, 20 bp, synthetic construct
  misc_feature 1..20: note = Description of Artificial Sequence: Synthetic oligonucleotide
  misc_feature 1..20: note = Target: ANGPTL3; (-) strand; PAM type: YTN; PAM sequence: TTT
  source 1..20: mol_type = other DNA
ctgaagtttgttagcttagt

SEQ ID NO: 11030 - DNA, 20 bp, synthetic construct
  misc_feature 1..20: note = Description of Artificial Sequence: Synthetic oligonucleotide
  misc_feature 1..20: note = Target: ANGPTL3; (-) strand; PAM type: YTN; PAM sequence: TTT
  source 1..20: mol_type = other DNA
tctgaagtttgttagcttag

SEQ ID NO: 11031 - DNA, 20 bp, synthetic construct
  misc_feature 1..20: note = Description of Artificial Sequence: Synthetic oligonucleotide
  misc_feature 1..20: note = Target: ANGPTL3; (-) strand; PAM type: YTN; PAM sequence: TTT
  source 1..20: mol_type = other DNA
ttctgaagtttgttagctta

SEQ ID NO: 11032 - DNA, 20 bp, synthetic construct
  misc_feature 1..20: note = Description of Artificial Sequence: Synthetic oligonucleotide
  misc_feature 1..20: note = Target: ANGPTL3; (-) strand; PAM type: YTN; PAM sequence: TTG
  source 1..20: mol_type = other DNA
cccatcataagtttttctga

SEQ ID NO: 11033 - DNA, 20 bp, synthetic construct
  misc_feature 1..20: note = Description of Artificial Sequence: Synthetic oligonucleotide
  misc_feature 1..20: note = Target: ANGPTL3; (-) strand; PAM type: YTN; PAM sequence: CTT
  source 1..20: mol_type = other DNA
gcccatcataagtttttctg

SEQ ID NO: 11034 - DNA, 20 bp, synthetic construct
  misc_feature 1..20: note = Description of Artificial Sequence: Synthetic oligonucleotide
  misc_feature 1..20: note = Target: ANGPTL3; (-) strand; PAM type: YTN; PAM sequence: TTC
  source 1..20: mol_type = other DNA
aatgtcacaagcagcttgcc

SEQ ID NO: 11035 - DNA, 20 bp, synthetic construct
  misc_feature 1..20: note = Description of Artificial Sequence: Synthetic oligonucleotide
  misc_feature 1..20: note = Target: ANGPTL3; (-) strand; PAM type: YTN; PAM sequence: CTT
  source 1..20: mol_type = other DNA
caatgtcacaagcagcttgc

SEQ ID NO: 11036 - DNA, 20 bp, synthetic construct
  misc_feature 1..20: note = Description of Artificial Sequence: Synthetic oligonucleotide
  misc_feature 1..20: note = Target: ANGPTL3; (-) strand; PAM type: YTN; PAM sequence: TTA
  source 1..20: mol_type = other DNA
aataccttcaatgtcacaag

SEQ ID NO: 11037 - DNA, 20 bp, synthetic construct
  misc_feature 1..20: note = Description of Artificial Sequence: Synthetic oligonucleotide
  misc_feature 1..20: note = Target: ANGPTL3; (-) strand; PAM type: YTN; PAM sequence: CTT
  source 1..20: mol_type = other DNA
aaataccttcaatgtcacaa

SEQ ID NO: 11038 - DNA, 20 bp, synthetic construct
  misc_feature 1..20: note = Description of Artificial Sequence: Synthetic oligonucleotide
  misc_feature 1..20: note = Target: ANGPTL3; (-) strand; PAM type: YTN; PAM sequence: TTG
  source 1..20: mol_type = other DNA
aatcttaaataccttcaatg

SEQ ID NO: 11039 - DNA, 20 bp, synthetic construct
  misc_feature 1..20: note = Description of Artificial Sequence: Synthetic oligonucleotide
  misc_feature 1..20: note = Target: ANGPTL3; (-) strand; PAM type: YTN; PAM sequence: CTA
  source 1..20: mol_type = other DNA
gaattgaatcttaaatacct

SEQ ID NO: 11040 - DNA, 20 bp, synthetic construct
  misc_feature 1..20: note = Description of Artificial Sequence: Synthetic oligonucleotide
  misc_feature 1..20: note = Target: ANGPTL3; (-) strand; PAM type: YTN; PAM sequence: CTA
  source 1..20: mol_type = other DNA
ggaccaaactagaattgaat

SEQ ID NO: 11041 - DNA, 20 bp, synthetic construct
  misc_feature 1..20: note = Description of Artificial Sequence: Synthetic oligonucleotide
  misc_feature 1..20: note = Target: ANGPTL3; (-) strand; PAM type: YTN; PAM sequence: TTG
  source 1..20: mol_type = other DNA
aaggaacaatggatatgtgg

SEQ ID NO: 11042 - DNA, 20 bp, synthetic construct
  misc_feature 1..20: note = Description of Artificial Sequence: Synthetic oligonucleotide
  misc_feature 1..20: note = Target: ANGPTL3; (-) strand; PAM type: YTN; PAM sequence: CTC
  source 1..20: mol_type = other DNA
gttgaaggaacaatggatat

SEQ ID NO: 11043 - DNA, 20 bp, synthetic construct
  misc_feature 1..20: note = Description of Artificial Sequence: Synthetic oligonucleotide
  misc_feature 1..20: note = Target: ANGPTL3; (-) strand; PAM type: YTN; PAM sequence: TTA
  source 1..20: mol_type = other DNA
ccatgtgctcgttgaaggaa

SEQ ID NO: 11044 - DNA, 20 bp, synthetic construct
  misc_feature 1..20: note = Description of Artificial Sequence: Synthetic oligonucleotide
  misc_feature 1..20: note = Target: ANGPTL3; (-) strand; PAM type: YTN; PAM sequence: TTT
  source 1..20: mol_type = other DNA
accatgtgctcgttgaagga

SEQ ID NO: 11045 - DNA, 20 bp, synthetic construct
  misc_feature 1..20: note = Description of Artificial Sequence: Synthetic oligonucleotide
  misc_feature 1..20: note = Target: ANGPTL3; (-) strand; PAM type: YTN; PAM sequence: CTT
  source 1..20: mol_type = other DNA
taccatgtgctcgttgaagg

SEQ ID NO: 11046 - DNA, 20 bp, synthetic construct
  misc_feature 1..20: note = Description of Artificial Sequence: Synthetic oligonucleotide
  misc_feature 1..20: note = Target: ANGPTL3; (-) strand; PAM type: YTN; PAM sequence: CTC
  source 1..20: mol_type = other DNA
tttaccatgtgctcgttgaa

SEQ ID NO: 11047 - DNA, 20 bp, synthetic construct
  misc_feature 1..20: note = Description of Artificial Sequence: Synthetic oligonucleotide
  misc_feature 1..20: note = Target: ANGPTL3; (-) strand; PAM type: YTN; PAM sequence: CTA
  source 1..20: mol_type = other DNA
ggctctttaccatgtgctcg

SEQ ID NO: 11048 - DNA, 20 bp, synthetic construct
  misc_feature 1..20: note = Description of Artificial Sequence: Synthetic oligonucleotide
  misc_feature 1..20: note = Target: ANGPTL3; (-) strand; PAM type: YTN; PAM sequence: TTC
  source 1..20: mol_type = other DNA
taggctctttaccatgtgct

SEQ ID NO: 11049 - DNA, 20 bp, synthetic construct
  misc_feature 1..20: note = Description of Artificial Sequence: Synthetic oligonucleotide
  misc_feature 1..20: note = Target: ANGPTL3; (-) strand; PAM type: YTN; PAM sequence: CTG
  source 1..20: mol_type = other DNA
tgttctaggctctttaccat

SEQ ID NO: 11050 - DNA, 20 bp, synthetic construct
  misc_feature 1..20: note = Description of Artificial Sequence: Synthetic oligonucleotide
  misc_feature 1..20: note = Target: ANGPTL3; (-) strand; PAM type: YTN; PAM sequence: CTC
  source 1..20: mol_type = other DNA
tgtgttctaggctctttacc

SEQ ID NO: 11051 - DNA, 20 bp, synthetic construct
  misc_feature 1..20: note = Description of Artificial Sequence: Synthetic oligonucleotide
  misc_feature 1..20: note = Target: ANGPTL3; (-) strand; PAM type: YTN; PAM sequence: CTG
  source 1..20: mol_type = other DNA
tgtctctgtgttctaggctc

SEQ ID NO: 11052 - DNA, 20 bp, synthetic construct
  misc_feature 1..20: note = Description of Artificial Sequence: Synthetic oligonucleotide
  misc_feature 1..20: note = Target: ANGPTL3; (-) strand; PAM type: YTN; PAM sequence: TTC
  source 1..20: mol_type = other DNA
tgtgtctctgtgttctaggc

SEQ ID NO: 11053 - DNA, 20 bp, synthetic construct
  misc_feature 1..20: note = Description of Artificial Sequence: Synthetic oligonucleotide
  misc_feature 1..20: note = Target: ANGPTL3; (-) strand; PAM type: YTN; PAM sequence: CTG
  source 1..20: mol_type = other DNA
tgttctgtgtctctgtgttc

SEQ ID NO: 11054 - DNA, 20 bp, synthetic construct
  misc_feature 1..20: note = Description of Artificial Sequence: Synthetic oligonucleotide
  misc_feature 1..20: note = Target: ANGPTL3; (-) strand; PAM type: YTN; PAM sequence: CTC
  source 1..20: mol_type = other DNA
cactgtgttctgtgtctctg

SEQ ID NO: 11055 - DNA, 20 bp, synthetic construct
  misc_feature 1..20: note = Description of Artificial Sequence: Synthetic oligonucleotide
  misc_feature 1..20: note = Target: ANGPTL3; (-) strand; PAM type: YTN; PAM sequence: TTC
  source 1..20: mol_type = other DNA
tccactgtgttctgtgtctc

SEQ ID NO: 11056 - DNA, 20 bp, synthetic construct
  misc_feature 1..20: note = Description of Artificial Sequence: Synthetic oligonucleotide
  misc_feature 1..20: note = Target: ANGPTL3; (-) strand; PAM type: YTN; PAM sequence: TTT
  source 1..20: mol_type = other DNA
ctccactgtgttctgtgtct

SEQ ID NO: 11057 - DNA, 20 bp, synthetic construct
  misc_feature 1..20: note = Description of Artificial Sequence: Synthetic oligonucleotide
  misc_feature 1..20: note = Target: ANGPTL3; (-) strand; PAM type: YTN; PAM sequence: TTT
  source 1..20: mol_type = other DNA
tctccactgtgttctgtgtc

SEQ ID NO: 11058 - DNA, 20 bp, synthetic construct
  misc_feature 1..20: note = Description of Artificial Sequence: Synthetic oligonucleotide
  misc_feature 1..20: note = Target: ANGPTL3; (-) strand; PAM type: YTN; PAM sequence: CTT
  source 1..20: mol_type = other DNA
ttctccactgtgttctgtgt

SEQ ID NO: 11059 - DNA, 20 bp, synthetic construct
  misc_feature 1..20: note = Description of Artificial Sequence: Synthetic oligonucleotide
  misc_feature 1..20: note = Target: ANGPTL3; (-) strand; PAM type: YTN; PAM sequence: CTC
  source 1..20: mol_type = other DNA
ccttttctccactgtgttct

SEQ ID NO: 11060 - DNA, 20 bp, synthetic construct
  misc_feature 1..20: note = Description of Artificial Sequence: Synthetic oligonucleotide
  misc_feature 1..20: note = Target: ANGPTL3; (-) strand; PAM type: YTN; PAM sequence: TTC
  source 1..20: mol_type = other DNA
actcccttttctccactgtg

SEQ ID NO: 11061 - DNA, 20 bp, synthetic construct
  misc_feature 1..20: note = Description of Artificial Sequence: Synthetic oligonucleotide
  misc_feature 1..20: note = Target: ANGPTL3; (-) strand; PAM type: YTN; PAM sequence: TTT
  source 1..20: mol_type = other DNA
cactcccttttctccactgt

SEQ ID NO: 11062 - DNA, 20 bp, synthetic construct
  misc_feature 1..20: note = Description of Artificial Sequence: Synthetic oligonucleotide
  misc_feature 1..20: note = Target: ANGPTL3; (-) strand; PAM type: YTN; PAM sequence: TTA
  source 1..20: mol_type = other DNA
aagacatttcactccctttt

SEQ ID NO: 11063 - DNA, 20 bp, synthetic construct
  misc_feature 1..20: note = Description of Artificial Sequence: Synthetic oligonucleotide
  misc_feature 1..20: note = Target: ANGPTL3; (-) strand; PAM type: YTN; PAM sequence: TTG
  source 1..20: mol_type = other DNA
tcacaaaatcccatatatag

SEQ ID NO: 11064 - DNA, 20 bp, synthetic construct
  misc_feature 1..20: note = Description of Artificial Sequence: Synthetic oligonucleotide
  misc_feature 1..20: note = Target: ANGPTL3; (-) strand; PAM type: YTN; PAM sequence: TTG
  source 1..20: mol_type = other DNA
tatattgtcacaaaatccca

SEQ ID NO: 11065 - DNA, 20 bp, synthetic construct
  misc_feature 1..20: note = Description of Artificial Sequence: Synthetic oligonucleotide
  misc_feature 1..20: note = Target: ANGPTL3; (-) strand; PAM type: YTN; PAM sequence: CTT
  source 1..20: mol_type = other DNA
gtatattgtcacaaaatccc

SEQ ID NO: 11066 - DNA, 20 bp, synthetic construct
  misc_feature 1..20: note = Description of Artificial Sequence: Synthetic oligonucleotide
  misc_feature 1..20: note = Target: ANGPTL3; (-) strand; PAM type: YTN; PAM sequence: TTA
  source 1..20: mol_type = other DNA
accatccttgtatattgtca

SEQ ID NO: 11067 - DNA, 20 bp, synthetic construct
  misc_feature 1..20: note = Description of Artificial Sequence: Synthetic oligonucleotide
  misc_feature 1..20: note = Target: ANGPTL3; (-) strand; PAM type: YTN; PAM sequence: CTT
  source 1..20: mol_type = other DNA
aaccatccttgtatattgtc

SEQ ID NO: 11068 - DNA, 20 bp, synthetic construct
  misc_feature 1..20: note = Description of Artificial Sequence: Synthetic oligonucleotide
  misc_feature 1..20: note = Target: ANGPTL3; (-) strand; PAM type: YTN; PAM sequence: TTA
  source 1..20: mol_type = other DNA
tatgtcttaaccatccttgt

SEQ ID NO: 11069 - DNA, 20 bp, synthetic construct
  misc_feature 1..20: note = Description of Artificial Sequence: Synthetic oligonucleotide
  misc_feature 1..20: note = Target: ANGPTL3; (-) strand; PAM type: YTN; PAM sequence: CTT
  source 1..20: mol_type = other DNA
atatgtcttaaccatccttg

SEQ ID NO: 11070 - DNA, 20 bp, synthetic construct
  misc_feature 1..20: note = Description of Artificial Sequence: Synthetic oligonucleotide
  misc_feature 1..20: note = Target: ANGPTL3; (-) strand; PAM type: YTN; PAM sequence: TTG
  source 1..20: mol_type = other DNA
catcaccttatatgtcttaa

SEQ ID NO: 11071 - DNA, 20 bp, synthetic construct
  misc_feature 1..20: note = Description of Artificial Sequence: Synthetic oligonucleotide
  misc_feature 1..20: note = Target: ANGPTL3; (-) strand; PAM type: YTN; PAM sequence: TTT
  source 1..20: mol_type = other DNA
gcatcaccttatatgtctta

SEQ ID NO: 11072 - DNA, 20 bp, synthetic construct
  misc_feature 1..20: note = Description of Artificial Sequence: Synthetic oligonucleotide
  misc_feature 1..20: note = Target: ANGPTL3; (-) strand; PAM type: YTN; PAM sequence: TTT
  source 1..20: mol_type = other DNA
tgcatcaccttatatgtctt

SEQ ID NO: 11073 - DNA, 20 bp, synthetic construct
  misc_feature 1..20: note = Description of Artificial Sequence: Synthetic oligonucleotide
  misc_feature 1..20: note = Target: ANGPTL3; (-) strand; PAM type: YTN; PAM sequence: TTT
  source 1..20: mol_type = other DNA
ttgcatcaccttatatgtct

SEQ ID NO: 11074 - DNA, 20 bp, synthetic construct
  misc_feature 1..20: note = Description of Artificial Sequence: Synthetic oligonucleotide
  misc_feature 1..20: note = Target: ANGPTL3; (-) strand; PAM type: YTN; PAM sequence: TTT
  source 1..20: mol_type = other DNA
tttgcatcaccttatatgtc

SEQ ID NO: 11075 - DNA, 20 bp, synthetic construct
  misc_feature 1..20: note = Description of Artificial Sequence: Synthetic oligonucleotide
  misc_feature 1..20: note = Target: ANGPTL3; (-) strand; PAM type: YTN; PAM sequence: TTT
  source 1..20: mol_type = other DNA
ttttgcatcaccttatatgt

SEQ ID NO: 11076 - DNA, 20 bp, synthetic construct
  misc_feature 1..20: note = Description of Artificial Sequence: Synthetic oligonucleotide
  misc_feature 1..20: note = Target: ANGPTL3; (-) strand; PAM type: YTN; PAM sequence: TTA
  source 1..20: mol_type = other DNA
atatgtttttttgcatcacc

SEQ ID NO: 11077 - DNA, 20 bp, synthetic construct
  misc_feature 1..20: note = Description of Artificial Sequence: Synthetic oligonucleotide
  misc_feature 1..20: note = Target: ANGPTL3; (-) strand; PAM type: YTN; PAM sequence: TTG
  source 1..20: mol_type = other DNA
ttaatatgtttttttgcatc

SEQ ID NO: 11078 - DNA, 20 bp, synthetic construct
  misc_feature 1..20: note = Description of Artificial Sequence: Synthetic oligonucleotide
  misc_feature 1..20: note = Target: ANGPTL3; (-) strand; PAM type: YTN; PAM sequence: CTA
  source 1..20: mol_type = other DNA
taattgttaatatgtttttt

SEQ ID NO: 11079 - DNA, 20 bp, synthetic construct
  misc_feature 1..20: note = Description of Artificial Sequence: Synthetic oligonucleotide
  misc_feature 1..20: note = Target: ANGPTL3; (-) strand; PAM type: YTN; PAM sequence: TTG
  source 1..20: mol_type = other DNA
tcactataattgttaatatg

SEQ ID NO: 11080 - DNA, 20 bp, synthetic construct
  misc_feature 1..20: note = Description of Artificial Sequence: Synthetic oligonucleotide
  misc_feature 1..20: note = Target: ANGPTL3; (-) strand; PAM type: YTN; PAM sequence: TTT
  source 1..20: mol_type = other DNA
gtcactataattgttaatat

SEQ ID NO: 11081 - DNA, 20 bp, synthetic construct
  misc_feature 1..20: note = Description of Artificial Sequence: Synthetic oligonucleotide
  misc_feature 1..20: note = Target: ANGPTL3; (-) strand; PAM type: YTN; PAM sequence: TTT
  source 1..20: mol_type = other DNA
tgtcactataattgttaata

SEQ ID NO: 11082 - DNA, 20 bp, synthetic construct
  misc_feature 1..20: note = Description of Artificial Sequence: Synthetic oligonucleotide
  misc_feature 1..20: note = Target: ANGPTL3; (-) strand; PAM type: YTN; PAM sequence: TTT
  source 1..20: mol_type = other DNA
ttgtcactataattgttaat

SEQ ID NO: 11083 - DNA, 20 bp, synthetic construct
  misc_feature 1..20: note = Description of Artificial Sequence: Synthetic oligonucleotide
  misc_feature 1..20: note = Target: ANGPTL3; (-) strand; PAM type: YTN; PAM sequence: TTT
  source 1..20: mol_type = other DNA
tttgtcactataattgttaa

SEQ ID NO: 11084 - DNA, 20 bp, synthetic construct
  misc_feature 1..20: note = Description of Artificial Sequence: Synthetic oligonucleotide
  misc_feature 1..20: note = Target: ANGPTL3; (-) strand; PAM type: YTN; PAM sequence: CTC
  source 1..20: mol_type = other DNA
attttttgtcactataattg

SEQ ID NO: 11085 - DNA, 20 bp, synthetic construct
  misc_feature 1..20: note = Description of Artificial Sequence: Synthetic oligonucleotide
  misc_feature 1..20: note = Target: ANGPTL3; (-) strand; PAM type: YTN; PAM sequence: CTC
  source 1..20: mol_type = other DNA
ctcattttttgtcactataa

SEQ ID NO: 11086 - DNA, 20 bp, synthetic construct
  misc_feature 1..20: note = Description of Artificial Sequence: Synthetic oligonucleotide
  misc_feature 1..20: note = Target: ANGPTL3; (-) strand; PAM type: YTN; PAM sequence: TTA
  source 1..20: mol_type = other DNA
tatgctcctcattttttgtc

SEQ ID NO: 11087 - DNA, 20 bp, synthetic construct
  misc_feature 1..20: note = Description of Artificial Sequence: Synthetic oligonucleotide
  misc_feature 1..20: note = Target: ANGPTL3; (-) strand; PAM type: YTN; PAM sequence: CTG
  source 1..20: mol_type = other DNA
tataaatcaatgtataatta

SEQ ID NO: 11088 - DNA, 20 bp, synthetic construct
  misc_feature 1..20: note = Description of Artificial Sequence: Synthetic oligonucleotide
  misc_feature 1..20: note = Target: ANGPTL3; (-) strand; PAM type: YTN; PAM sequence: CTC
  source 1..20: mol_type = other DNA
tgtataaatcaatgtataat

SEQ ID NO: 11089 - DNA, 20 bp, synthetic construct
  misc_feature 1..20: note = Description of Artificial Sequence: Synthetic oligonucleotide
  misc_feature 1..20: note = Target: ANGPTL3; (-) strand; PAM type: YTN; PAM sequence: CTG
  source 1..20: mol_type = other DNA
gtactctgtataaatcaatg

SEQ ID NO: 11090 - DNA, 20 bp, synthetic construct
  misc_feature 1..20: note = Description of Artificial Sequence: Synthetic oligonucleotide
  misc_feature 1..20: note = Target: ANGPTL3; (-) strand; PAM type: YTN; PAM sequence: CTC
  source 1..20: mol_type = other DNA
tggtactctgtataaatcaa

SEQ ID NO: 11091 - DNA, 20 bp, synthetic construct
  misc_feature 1..20: note = Description of Artificial Sequence: Synthetic oligonucleotide
  misc_feature 1..20: note = Target: ANGPTL3; (-) strand; PAM type: YTN; PAM sequence: TTC
  source 1..20: mol_type = other DNA
ctctggtactctgtataaat

SEQ ID NO: 11092 - DNA, 20 bp, synthetic construct
  misc_feature 1..20: note = Description of Artificial Sequence: Synthetic oligonucleotide
  misc_feature 1..20: note = Target: ANGPTL3; (-) strand; PAM type: YTN; PAM sequence: CTG
  source 1..20: mol_type = other DNA
tgttcctctggtactctgta

SEQ ID NO: 11093 - DNA, 20 bp, synthetic construct
  misc_feature 1..20: note = Description of Artificial Sequence: Synthetic oligonucleotide
  misc_feature 1..20: note = Target: ANGPTL3; (-) strand; PAM type: YTN; PAM sequence: CTC
  source 1..20: mol_type = other DNA
aatgctgtgttcctctggta

SEQ ID NO: 11094 - DNA, 20 bp, synthetic construct
  misc_feature 1..20: note = Description of Artificial Sequence: Synthetic oligonucleotide
  misc_feature 1..20: note = Target: ANGPTL3; (-) strand; PAM type: YTN; PAM sequence: CTC
  source 1..20: mol_type = other DNA
tcaatgctgtgttcctctgg

SEQ ID NO: 11095 - DNA, 20 bp, synthetic construct
  misc_feature 1..20: note = Description of Artificial Sequence: Synthetic oligonucleotide
  misc_feature 1..20: note = Target: ANGPTL3; (-) strand; PAM type: YTN; PAM sequence: TTA
  source 1..20: mol_type = other DNA
cggctctcaatgctgtgttc

SEQ ID NO: 11096 - DNA, 20 bp, synthetic construct
  misc_feature 1..20: note = Description of Artificial Sequence: Synthetic oligonucleotide
  misc_feature 1..20: note = Target: ANGPTL3; (-) strand; PAM type: YTN; PAM sequence: CTC
  source 1..20: mol_type = other DNA
aggtggtgttacggctctca

SEQ ID NO: 11097 - DNA, 20 bp, synthetic construct
  misc_feature 1..20: note = Description of Artificial Sequence: Synthetic oligonucleotide
  misc_feature 1..20: note = Target: ANGPTL3; (-) strand; PAM type: YTN; PAM sequence: CTC
  source 1..20: mol_type = other DNA
cctcaggtggtgttacggct

SEQ ID NO: 11098 - DNA, 20 bp, synthetic construct
  misc_feature 1..20: note = Description of Artificial Sequence: Synthetic oligonucleotide
  misc_feature 1..20: note = Target: ANGPTL3; (-) strand; PAM type: YTN; PAM sequence: CTC
  source 1..20: mol_type = other DNA
cactccctcaggtggtgtta

SEQ ID NO: 11099 - DNA, 20 bp, synthetic construct
  misc_feature 1..20: note = Description of Artificial Sequence: Synthetic oligonucleotide
  misc_feature 1..20: note = Target: ANGPTL3; (-) strand; PAM type: YTN; PAM sequence: TTC
  source 1..20: mol_type = other DNA
tccactccctcaggtggtgt

SEQ ID NO: 11100 - DNA, 20 bp, synthetic construct
  misc_feature 1..20: note = Description of Artificial Sequence: Synthetic oligonucleotide
  misc_feature 1..20: note = Target: ANGPTL3; (-) strand; PAM type: YTN; PAM sequence: TTT
  source 1..20: mol_type = other DNA
ctccactccctcaggtggtg

SEQ ID NO: 11101 - DNA, 20 bp, synthetic construct
  misc_feature 1..20: note = Description of Artificial Sequence: Synthetic oligonucleotide
  misc_feature 1..20: note = Target: ANGPTL3; (-) strand; PAM type: YTN; PAM sequence: CTT
  source 1..20: mol_type = other DNA
tctccactccctcaggtggt

SEQ ID NO: 11102 - DNA, 20 bp, synthetic construct
  misc_feature 1..20: note = Description of Artificial Sequence: Synthetic oligonucleotide
  misc_feature 1..20: note = Target: ANGPTL3; (-) strand; PAM type: YTN; PAM sequence: CTG
  source 1..20: mol_type = other DNA
aagcctttctccactccctc

SEQ ID NO: 11103 - DNA, 20 bp, synthetic construct
  misc_feature 1..20: note = Description of Artificial Sequence: Synthetic oligonucleotide
  misc_feature 1..20: note = Target: ANGPTL3; (-) strand; PAM type: YTN; PAM sequence: CTC
  source 1..20: mol_type = other DNA
tgaagcctttctccactccc

SEQ ID NO: 11104 - DNA, 20 bp, synthetic construct
  misc_feature 1..20: note = Description of Artificial Sequence: Synthetic oligonucleotide
  misc_feature 1..20: note = Target: ANGPTL3; (-) strand; PAM type: YTN; PAM sequence: CTC
  source 1..20: mol_type = other DNA
tctgaagcctttctccactc

SEQ ID NO: 11105 - DNA, 20 bp, synthetic construct
  misc_feature 1..20: note = Description of Artificial Sequence: Synthetic oligonucleotide
  misc_feature 1..20: note = Target: ANGPTL3; (-) strand; PAM type: YTN; PAM sequence: TTC
  source 1..20: mol_type = other DNA
tctctgaagcctttctccac

SEQ ID NO: 11106 - DNA, 20 bp, synthetic construct
  misc_feature 1..20: note = Description of Artificial Sequence: Synthetic oligonucleotide
  misc_feature 1..20: note = Target: ANGPTL3; (-) strand; PAM type: YTN; PAM sequence: TTT
  source 1..20: mol_type = other DNA
ctctctgaagcctttctcca

SEQ ID NO: 11107 - DNA, 20 bp, synthetic construct
  misc_feature 1..20: note = Description of Artificial Sequence: Synthetic oligonucleotide
  misc_feature 1..20: note = Target: ANGPTL3; (-) strand; PAM type: YTN; PAM sequence: CTT
  source 1..20: mol_type = other DNA
tctctctgaagcctttctcc

SEQ ID NO: 11108 - DNA, 20 bp, synthetic construct
  misc_feature 1..20: note = Description of Artificial Sequence: Synthetic oligonucleotide
  misc_feature 1..20: note = Target: ANGPTL3; (-) strand; PAM type: YTN; PAM sequence: TTC
  source 1..20: mol_type = other DNA
caaaaaacactttctctctg

SEQ ID NO: 11109 - DNA, 20 bp, synthetic construct
  misc_feature 1..20: note = Description of Artificial Sequence: Synthetic oligonucleotide
  misc_feature 1..20: note = Target: ANGPTL3; (-) strand; PAM type: YTN; PAM sequence: TTG
  source 1..20: mol_type = other DNA
gaaacagtgatccattccaa

SEQ ID NO: 11110 - DNA, 20 bp, synthetic construct
  misc_feature 1..20: note = Description of Artificial Sequence: Synthetic oligonucleotide
  misc_feature 1..20: note = Target: ANGPTL3; (-) strand; PAM type: YTN; PAM sequence: TTT
  source 1..20: mol_type = other DNA
ggaaacagtgatccattcca

SEQ ID NO: 11111 - DNA, 20 bp, synthetic construct
  misc_feature 1..20: note = Description of Artificial Sequence: Synthetic oligonucleotide
  misc_feature 1..20: note = Target: ANGPTL3; (-) strand; PAM type: YTN; PAM sequence: TTT
  source 1..20: mol_type = other DNA
tggaaacagtgatccattcc

SEQ ID NO: 11112 - DNA, 20 bp, synthetic construct
  misc_feature 1..20: note = Description of Artificial Sequence: Synthetic oligonucleotide
  misc_feature 1..20: note = Target: ANGPTL3; (-) strand; PAM type: YTN; PAM sequence: CTT
  source 1..20: mol_type = other DNA
ttggaaacagtgatccattc

SEQ ID NO: 11113 - DNA, 20 bp, synthetic construct
  misc_feature 1..20: note = Description of Artificial Sequence: Synthetic oligonucleotide
  misc_feature 1..20: note = Target: ANGPTL3; (-) strand; PAM type: YTN; PAM sequence: TTC
  source 1..20: mol_type = other DNA
ttttggaaacagtgatccat

SEQ ID NO: 11114 - DNA, 20 bp, synthetic construct
  misc_feature 1..20: note = Description of Artificial Sequence: Synthetic oligonucleotide
  misc_feature 1..20: note = Target: ANGPTL3; (-) strand; PAM type: YTN; PAM sequence: TTA
  source 1..20: mol_type = other DNA
gttcttttggaaacagtgat

SEQ ID NO: 11115 - DNA, 20 bp, synthetic construct
  misc_feature 1..20: note = Description of Artificial Sequence: Synthetic oligonucleotide
  misc_feature 1..20: note = Target: ANGPTL3; (-) strand; PAM type: YTN; PAM sequence: TTT
  source 1..20: mol_type = other DNA
agttcttttggaaacagtga

SEQ ID NO: 11116 - DNA, 20 bp, synthetic construct
  misc_feature 1..20: note = Description of Artificial Sequence: Synthetic oligonucleotide
  misc_feature 1..20: note = Target: ANGPTL3; (-) strand; PAM type: YTN; PAM sequence: CTT
  source 1..20: mol_type = other DNA
tagttcttttggaaacagtg

SEQ ID NO: 11117 - DNA, 20 bp, synthetic construct
  misc_feature 1..20: note = Description of Artificial Sequence: Synthetic oligonucleotide
  misc_feature 1..20: note = Target: ANGPTL3; (-) strand; PAM type: YTN; PAM sequence: CTG
  source 1..20: mol_type = other DNA
tactttagttcttttggaaa

SEQ ID NO: 11118 - DNA, 20 bp, synthetic construct
  misc_feature 1..20: note = Description of Artificial Sequence: Synthetic oligonucleotide
  misc_feature 1..20: note = Target: ANGPTL3; (-) strand; PAM type: YTN; PAM sequence: CTC
  source 1..20: mol_type = other DNA
aaactgtactttagttcttt

SEQ ID NO: 11119 - DNA, 20 bp, synthetic construct
  misc_feature 1..20: note = Description of Artificial Sequence: Synthetic oligonucleotide
  misc_feature 1..20: note = Target: ANGPTL3; (-) strand; PAM type: YTN; PAM sequence: TTC
  source 1..20: mol_type = other DNA
tcaaactgtactttagttct

SEQ ID NO: 11120 - DNA, 20 bp, synthetic construct
  misc_feature 1..20: note = Description of Artificial Sequence: Synthetic oligonucleotide
  misc_feature 1..20: note = Target: ANGPTL3; (-) strand; PAM type: YTN; PAM sequence: TTT
  source 1..20: mol_type = other DNA
ctcaaactgtactttagttc

SEQ ID NO: 11121 - DNA, 20 bp, synthetic construct
  misc_feature 1..20: note = Description of Artificial Sequence: Synthetic oligonucleotide
  misc_feature 1..20: note = Target: ANGPTL3; (-) strand; PAM type: YTN; PAM sequence: TTA
  source 1..20: mol_type = other DNA
agtatgcatttctcaaactg

SEQ ID NO: 11122 - DNA, 20 bp, synthetic construct
  misc_feature 1..20: note = Description of Artificial Sequence: Synthetic oligonucleotide
  misc_feature 1..20: note = Target: ANGPTL3; (-) strand; PAM type: YTN; PAM sequence: TTG
  source 1..20: mol_type = other DNA
aggggaaaaaagtaatgaat

SEQ ID NO: 11123 - DNA, 20 bp, synthetic construct
  misc_feature 1..20: note = Description of Artificial Sequence: Synthetic oligonucleotide
  misc_feature 1..20: note = Target: ANGPTL3; (-) strand; PAM type: YTN; PAM sequence: TTA
  source 1..20: mol_type = other DNA
aagttgaggggaaaaaagta

SEQ ID NO: 11124 - DNA, 20 bp, synthetic construct
  misc_feature 1..20: note = Description of Artificial Sequence: Synthetic oligonucleotide
  misc_feature 1..20: note = Target: ANGPTL3; (-) strand; PAM type: YTN; PAM sequence: TTA
  source 1..20: mol_type = other DNA
ttaaagttgaggggaaaaaa

SEQ ID NO: 11125 - DNA, 20 bp, synthetic construct
  misc_feature 1..20: note = Description of Artificial Sequence: Synthetic oligonucleotide
  misc_feature 1..20: note = Target: ANGPTL3; (-) strand; PAM type: YTN; PAM sequence: TTA
  source 1..20: mol_type = other DNA
ttattaaagttgaggggaaa

SEQ ID NO: 11126 - DNA, 20 bp, synthetic construct
  misc_feature 1..20: note = Description of Artificial Sequence: Synthetic oligonucleotide
  misc_feature 1..20: note = Target: ANGPTL3; (-) strand; PAM type: YTN; PAM sequence: TTT
  source 1..20: mol_type = other DNA
attattaaagttgaggggaa

SEQ ID NO: 11127 - DNA, 20 bp, synthetic construct
  misc_feature 1..20: note = Description of Artificial Sequence: Synthetic oligonucleotide
  misc_feature 1..20: note = Target: ANGPTL3; (-) strand; PAM type: YTN; PAM sequence: TTG
  source 1..20: mol_type = other DNA
ggtaaatttattattaaagt

SEQ ID NO: 11128 - DNA, 20 bp, synthetic construct
  misc_feature 1..20: note = Description of Artificial Sequence: Synthetic oligonucleotide
  misc_feature 1..20: note = Target: ANGPTL3; (-) strand; PAM type: YTN; PAM sequence: TTG
  source 1..20: mol_type = other DNA
ttgggtaaatttattattaa

SEQ ID NO: 11129 - DNA, 20 bp, synthetic construct
  misc_feature 1..20: note = Description of Artificial Sequence: Synthetic oligonucleotide
  misc_feature 1..20: note = Target: ANGPTL3; (-) strand; PAM type: YTN; PAM sequence: TTT
  source 1..20: mol_type = other DNA
gttgggtaaatttattatta

SEQ ID NO: 11130 - DNA, 20 bp, synthetic construct
  misc_feature 1..20: note = Description of Artificial Sequence: Synthetic oligonucleotide
  misc_feature 1..20: note = Target: ANGPTL3; (-) strand; PAM type: YTN; PAM sequence: TTT
  source 1..20: mol_type = other DNA
tgttgggtaaatttattatt

SEQ ID NO: 11131 - DNA, 20 bp, synthetic construct
  misc_feature 1..20: note = Description of Artificial Sequence: Synthetic oligonucleotide
  misc_feature 1..20: note = Target: ANGPTL3; (-) strand; PAM type: YTN; PAM sequence: TTT
  source 1..20: mol_type = other DNA
ttgttgggtaaatttattat

SEQ ID NO: 11132 - DNA, 20 bp, synthetic construct
  misc_feature 1..20: note = Description of Artificial Sequence: Synthetic oligonucleotide
  misc_feature 1..20: note = Target: ANGPTL3; (-) strand; PAM type: YTN; PAM sequence: TTT
  source 1..20: mol_type = other DNA
tttgttgggtaaatttatta

SEQ ID NO: 11133 - DNA, 20 bp, synthetic construct
  misc_feature 1..20: note = Description of Artificial Sequence: Synthetic oligonucleotide
  misc_feature 1..20: note = Target: ANGPTL3; (-) strand; PAM type: YTN; PAM sequence: CTT
  source 1..20: mol_type = other DNA
ttttgttgggtaaatttatt

SEQ ID NO: 11134 - DNA, 20 bp, synthetic construct
  misc_feature 1..20: note = Description of Artificial Sequence: Synthetic oligonucleotide
  misc_feature 1..20: note = Target: ANGPTL3; (-) strand; PAM type: YTN; PAM sequence: TTA
  source 1..20: mol_type = other DNA
caagtcaaaaataaactttt

SEQ ID NO: 11135 - DNA, 20 bp, synthetic construct
  misc_feature 1..20: note = Description of Artificial Sequence: Synthetic oligonucleotide
  misc_feature 1..20: note = Target: ANGPTL3; (-) strand; PAM type: YTN; PAM sequence: TTT
  source 1..20: mol_type = other DNA
acaagtcaaaaataaacttt

SEQ ID NO: 11136 - DNA, 20 bp, synthetic construct
  misc_feature 1..20: note = Description of Artificial Sequence: Synthetic oligonucleotide
  misc_feature 1..20: note = Target: ANGPTL3; (-) strand; PAM type: YTN; PAM sequence: TTA
  source 1..20: mol_type = other DNA
agagatttacaagtcaaaaa

SEQ ID NO: 11137 - DNA, 20 bp, synthetic construct
  misc_feature 1..20: note = Description of Artificial Sequence: Synthetic oligonucleotide
  misc_feature 1..20: note = Target: ANGPTL3; (-) strand; PAM type: YTN; PAM sequence: TTT
  source 1..20: mol_type = other DNA
aagagatttacaagtcaaaa

SEQ ID NO: 11138 - DNA, 20 bp, synthetic construct
  misc_feature 1..20: note = Description of Artificial Sequence: Synthetic oligonucleotide
  misc_feature 1..20: note = Target: ANGPTL3; (-) strand; PAM type: YTN; PAM sequence: TTT
  source 1..20: mol_type = other DNA
taagagatttacaagtcaaa

SEQ ID NO: 11139 - DNA, 20 bp, synthetic construct
  misc_feature 1..20: note = Description of Artificial Sequence: Synthetic oligonucleotide
  misc_feature 1..20: note = Target: ANGPTL3; (-) strand; PAM type: YTN; PAM sequence: TTA
  source 1..20: mol_type = other DNA
tgattttaagagatttacaa

SEQ ID NO: 11140 - DNA, 20 bp, synthetic construct
  misc_feature 1..20: note = Description of Artificial Sequence: Synthetic oligonucleotide
  misc_feature 1..20: note = Target: ANGPTL3; (-) strand; PAM type: YTN; PAM sequence: TTT
  source 1..20: mol_type = other DNA
atgattttaagagatttaca

SEQ ID NO: 11141 - DNA, 20 bp, synthetic construct
  misc_feature 1..20: note = Description of Artificial Sequence: Synthetic oligonucleotide
  misc_feature 1..20: note = Target: ANGPTL3; (-) strand; PAM type: YTN; PAM sequence: TTT
  source 1..20: mol_type = other DNA
tatgattttaagagatttac

SEQ ID NO: 11142 - DNA, 20 bp, synthetic construct
  misc_feature 1..20: note = Description of Artificial Sequence: Synthetic oligonucleotide
  misc_feature 1..20: note = Target: ANGPTL3; (-) strand; PAM type: YTN; PAM sequence: TTT
  source 1..20: mol_type = other DNA
ttatgattttaagagattta

SEQ ID NO: 11143 - DNA, 20 bp, synthetic construct
  misc_feature 1..20: note = Description of Artificial Sequence: Synthetic oligonucleotide
  misc_feature 1..20: note = Target: ANGPTL3; (-) strand; PAM type: YTN; PAM sequence: TTT
  source 1..20: mol_type = other DNA
tttatgattttaagagattt

SEQ ID NO: 11144 - DNA, 20 bp, synthetic construct
  misc_feature 1..20: note = Description of Artificial Sequence: Synthetic oligonucleotide
  misc_feature 1..20: note = Target: ANGPTL3; (-) strand; PAM type: YTN; PAM sequence: CTT
  source 1..20: mol_type = other DNA
ttttatgattttaagagatt

SEQ ID NO: 11145 - DNA, 20 bp, synthetic construct
  misc_feature 1..20: note = Description of Artificial Sequence: Synthetic oligonucleotide
  misc_feature 1..20: note = Target: ANGPTL3; (-) strand; PAM type: YTN; PAM sequence: TTA
  source 1..20: mol_type = other DNA
cttttttatgattttaagag

SEQ ID NO: 11146 - DNA, 20 bp, synthetic construct
  misc_feature 1..20: note = Description of Artificial Sequence: Synthetic oligonucleotide
  misc_feature 1..20: note = Target: ANGPTL3; (-) strand; PAM type: YTN; PAM sequence: TTT
  source 1..20: mol_type = other DNA
acttttttatgattttaaga

SEQ ID NO: 11147 - DNA, 20 bp, synthetic construct
  misc_feature 1..20: note = Description of Artificial Sequence: Synthetic oligonucleotide
  misc_feature 1..20: note = Target: ANGPTL3; (-) strand; PAM type: YTN; PAM sequence: TTT
  source 1..20: mol_type = other DNA
tacttttttatgattttaag

SEQ ID NO: 11148 - DNA, 20 bp, synthetic construct
  misc_feature 1..20: note = Description of Artificial Sequence: Synthetic oligonucleotide
  misc_feature 1..20: note = Target: ANGPTL3; (-) strand; PAM type: YTN; PAM sequence: CTA
  source 1..20: mol_type = other DNA
attttacttttttatgattt

SEQ ID NO: 11149 - DNA, 20 bp, synthetic construct
  misc_feature 1..20: note = Description of Artificial Sequence: Synthetic oligonucleotide
  misc_feature 1..20: note = Target: ANGPTL3; (-) strand; PAM type: YTN; PAM sequence: TTA
  source 1..20: mol_type = other DNA
aaagctaattttactttttt

SEQ ID NO: 11150 - DNA, 20 bp, synthetic construct
  misc_feature 1..20: note = Description of Artificial Sequence: Synthetic oligonucleotide
  misc_feature 1..20: note = Target: ANGPTL3; (-) strand; PAM type: YTN; PAM sequence: TTT
  source 1..20: mol_type = other DNA
aaaagctaattttacttttt

SEQ ID NO: 11151 - DNA, 20 bp, synthetic construct
  misc_feature 1..20: note = Description of Artificial Sequence: Synthetic oligonucleotide
  misc_feature 1..20: note = Target: ANGPTL3; (-) strand; PAM type: YTN; PAM sequence: TTT
  source 1..20: mol_type = other DNA
taaaagctaattttactttt

SEQ ID NO: 11152 - DNA, 20 bp, synthetic construct
  misc_feature 1..20: note = Description of Artificial Sequence: Synthetic oligonucleotide
  misc_feature 1..20: note = Target: ANGPTL3; (-) strand; PAM type: YTN; PAM sequence: TTT
  source 1..20: mol_type = other DNA
ttaaaagctaattttacttt

SEQ ID NO: 11153 - DNA, 20 bp, synthetic construct
  misc_feature 1..20: note = Description of Artificial Sequence: Synthetic oligonucleotide
  misc_feature 1..20: note = Target: ANGPTL3; (-) strand; PAM type: YTN; PAM sequence: CTG
  source 1..20: mol_type = other DNA
tttttaaaagctaattttac

SEQ ID NO: 11154 - DNA, 20 bp, synthetic construct
  misc_feature 1..20: note = Description of Artificial Sequence: Synthetic oligonucleotide
  misc_feature 1..20: note = Target: ANGPTL3; (-) strand; PAM type: YTN; PAM sequence: CTA
  source 1..20: mol_type = other DNA
cctgtttttaaaagctaatt

SEQ ID NO: 11155 - DNA, 20 bp, synthetic construct
  misc_feature 1..20: note = Description of Artificial Sequence: Synthetic oligonucleotide
  misc_feature 1..20: note = Target: ANGPTL3; (-) strand; PAM type: YTN; PAM sequence: CTA
  source 1..20: mol_type = other DNA
tggtgactacctgtttttaa

SEQ ID NO: 11156 - DNA, 20 bp, synthetic construct
  misc_feature 1..20: note = Description of Artificial Sequence: Synthetic oligonucleotide
  misc_feature 1..20: note = Target: ANGPTL3; (-) strand; PAM type: YTN; PAM sequence: TTC
  source 1..20: mol_type = other DNA
aatgctatggtgactacctg

SEQ ID NO: 11157 - DNA, 20 bp, synthetic construct
  misc_feature 1..20: note = Description of Artificial Sequence: Synthetic oligonucleotide
  misc_feature 1..20: note = Target: ANGPTL3; (-) strand; PAM type: YTN; PAM sequence: CTA
  source 1..20: mol_type = other DNA
cacattcaatgctatggtga

SEQ ID NO: 11158 - DNA, 20 bp, synthetic construct
  misc_feature 1..20: note = Description of Artificial Sequence: Synthetic oligonucleotide
  misc_feature 1..20: note = Target: ANGPTL3; (-) strand; PAM type: YTN; PAM sequence: TTA
  source 1..20: mol_type = other DNA
taaactacacattcaatgct

SEQ ID NO: 11159 - DNA, 20 bp, synthetic construct
  misc_feature 1..20: note = Description of Artificial Sequence: Synthetic oligonucleotide
  misc_feature 1..20: note = Target: ANGPTL3; (-) strand; PAM type: YTN; PAM sequence: CTG
  source 1..20: mol_type = other DNA
tattataaactacacattca

SEQ ID NO: 11160 - DNA, 20 bp, synthetic construct
  misc_feature 1..20: note = Description of Artificial Sequence: Synthetic oligonucleotide
  misc_feature 1..20: note = Target: ANGPTL3; (-) strand; PAM type: YTN; PAM sequence: TTG
  source 1..20: mol_type = other DNA
ctgtattataaactacacat

SEQ ID NO: 11161 - DNA, 20 bp, synthetic construct
  misc_feature 1..20: note = Description of Artificial Sequence: Synthetic oligonucleotide
  misc_feature 1..20: note = Target: ANGPTL3; (-) strand; PAM type: YTN; PAM sequence: TTT
  source 1..20: mol_type = other DNA
gctgtattataaactacaca

SEQ ID NO: 11162 - DNA, 20 bp, synthetic construct
  misc_feature 1..20: note = Description of Artificial Sequence: Synthetic oligonucleotide
  misc_feature 1..20: note = Target: ANGPTL3; (-) strand; PAM type: YTN; PAM sequence: CTT
  source 1..20: mol_type = other DNA
tgctgtattataaactacac

SEQ ID NO: 11163 - DNA, 20 bp, synthetic construct
  misc_feature 1..20: note = Description of Artificial Sequence: Synthetic oligonucleotide
  misc_feature 1..20: note = Target: ANGPTL3; (-) strand; PAM type: YTN; PAM sequence: TTA
  source 1..20: mol_type = other DNA
actttgctgtattataaact

SEQ ID NO: 11164 - DNA, 20 bp, synthetic construct
  misc_feature 1..20: note = Description of Artificial Sequence: Synthetic oligonucleotide
  misc_feature 1..20: note = Target: ANGPTL3; (-) strand; PAM type: YTN; PAM sequence: TTT
  source 1..20: mol_type = other DNA
aactttgctgtattataaac

SEQ ID NO: 11165 - DNA, 20 bp, synthetic construct
  misc_feature 1..20: note = Description of Artificial Sequence: Synthetic oligonucleotide
  misc_feature 1..20: note = Target: ANGPTL3; (-) strand; PAM type: YTN; PAM sequence: TTG
  source 1..20: mol_type = other DNA
tatttaactttgctgtatta

SEQ ID NO: 11166 - DNA, 20 bp, synthetic construct
  misc_feature 1..20: note = Description of Artificial Sequence: Synthetic oligonucleotide
  misc_feature 1..20: note = Target: ANGPTL3; (-) strand; PAM type: YTN; PAM sequence: TTG
  source 1..20: mol_type = other DNA
aaattgtatttaactttgct

SEQ ID NO: 11167 - DNA, 20 bp, synthetic construct
  misc_feature 1..20: note = Description of Artificial Sequence: Synthetic oligonucleotide
  misc_feature 1..20: note = Target: ANGPTL3; (-) strand; PAM type: YTN; PAM sequence: TTT
  source 1..20: mol_type = other DNA
gaaattgtatttaactttgc

SEQ ID NO: 11168 - DNA, 20 bp, synthetic construct
  misc_feature 1..20: note = Description of Artificial Sequence: Synthetic oligonucleotide
  misc_feature 1..20: note = Target: ANGPTL3; (-) strand; PAM type: YTN; PAM sequence: TTA
  source 1..20: mol_type = other DNA
ataggtaatttgaaattgta

SEQ ID NO: 11169 - DNA, 20 bp, synthetic construct
  misc_feature 1..20: note = Description of Artificial Sequence: Synthetic oligonucleotide
  misc_feature 1..20: note = Target: ANGPTL3; (-) strand; PAM type: YTN; PAM sequence: CTT
  source 1..20: mol_type = other DNA
aataggtaatttgaaattgt

SEQ ID NO: 11170 - DNA, 20 bp, synthetic construct
  misc_feature 1..20: note = Description of Artificial Sequence: Synthetic oligonucleotide
  misc_feature 1..20: note = Target: ANGPTL3; (-) strand; PAM type: YTN; PAM sequence: CTA
  source 1..20: mol_type = other DNA
acttaataggtaatttgaaa

SEQ ID NO: 11171 - DNA, 20 bp, synthetic construct
  misc_feature 1..20: note = Description of Artificial Sequence: Synthetic oligonucleotide
  misc_feature 1..20: note = Target: ANGPTL3; (-) strand; PAM type: YTN; PAM sequence: CTA
  source 1..20: mol_type = other DNA
aatgaaatcaaagaaatgag

SEQ ID NO: 11172 - DNA, 20 bp, synthetic construct
  misc_feature 1..20: note = Description of Artificial Sequence: Synthetic oligonucleotide
  misc_feature 1..20: note = Target: ANGPTL3; (-) strand; PAM type: YTN; PAM sequence: TTA
  source 1..20: mol_type = other DNA
gatcaatgctaaatgaaatc

SEQ ID NO: 11173 - DNA, 20 bp, synthetic construct
  misc_feature 1..20: note = Description of Artificial Sequence: Synthetic oligonucleotide
  misc_feature 1..20: note = Target: ANGPTL3; (-) strand; PAM type: YTN; PAM sequence: TTG
  source 1..20: mol_type = other DNA
agttagatcaatgctaaatg

SEQ ID NO: 11174 - DNA, 20 bp, synthetic construct
  misc_feature 1..20: note = Description of Artificial Sequence: Synthetic oligonucleotide
  misc_feature 1..20: note = Target: ANGPTL3; (-) strand; PAM type: YTN; PAM sequence: TTC
  source 1..20: mol_type = other DNA
cacattgagttagatcaatg

SEQ ID NO: 11175 - DNA, 20 bp, synthetic construct
  misc_feature 1..20: note = Description of Artificial Sequence: Synthetic oligonucleotide
  misc_feature 1..20: note = Target: ANGPTL3; (-) strand; PAM type: YTN; PAM sequence: CTT
  source 1..20: mol_type = other DNA
ccacattgagttagatcaat

SEQ ID NO: 11176 - DNA, 20 bp, synthetic construct
  misc_feature 1..20: note = Description of Artificial Sequence: Synthetic oligonucleotide
  misc_feature 1..20: note = Target: ANGPTL3; (-) strand; PAM type: YTN; PAM sequence: TTC
  source 1..20: mol_type = other DNA
ttccacattgagttagatca

SEQ ID NO: 11177 - DNA, 20 bp, synthetic construct
  misc_feature 1..20: note = Description of Artificial Sequence: Synthetic oligonucleotide
  misc_feature 1..20: note = Target: ANGPTL3; (-) strand; PAM type: YTN; PAM sequence: CTT
  source 1..20: mol_type = other DNA
cttccacattgagttagatc

SEQ ID NO: 11178 - DNA, 20 bp, synthetic construct
  misc_feature 1..20: note = Description of Artificial Sequence: Synthetic oligonucleotide
  misc_feature 1..20: note = Target: ANGPTL3; (-) strand; PAM type: YTN; PAM sequence: TTG
  source 1..20: mol_type = other DNA
cacgaatgtaaccttcttcc

SEQ ID NO: 11179 - DNA, 20 bp, synthetic construct
  misc_feature 1..20: note = Description of Artificial Sequence: Synthetic oligonucleotide
  misc_feature 1..20: note = Target: ANGPTL3; (-) strand; PAM type: YTN; PAM sequence: CTT
  source 1..20: mol_type = other DNA
gcacgaatgtaaccttcttc

SEQ ID NO: 11180 - DNA, 20 bp, synthetic construct
  misc_feature 1..20: note = Description of Artificial Sequence: Synthetic oligonucleotide
  misc_feature 1..20: note = Target: ANGPTL3; (-) strand; PAM type: YTN; PAM sequence: TTA
  source 1..20: mol_type = other DNA
acttgcacgaatgtaacctt

SEQ ID NO: 11181 - DNA, 20 bp, synthetic construct
  misc_feature 1..20: note = Description of Artificial Sequence: Synthetic oligonucleotide
  misc_feature 1..20: note = Target: ANGPTL3; (-) strand; PAM type: YTN; PAM sequence: TTA
  source 1..20: mol_type = other DNA
agccgtgttaacttgcacga

SEQ ID NO: 11182 - DNA, 20 bp, synthetic construct
  misc_feature 1..20: note = Description of Artificial Sequence: Synthetic oligonucleotide
  misc_feature 1..20: note = Target: ANGPTL3; (-) strand; PAM type: YTN; PAM sequence: TTA
  source 1..20: mol_type = other DNA
atcattaagccgtgttaact

SEQ ID NO: 11183 - DNA, 20 bp, synthetic construct
  misc_feature 1..20: note = Description of Artificial Sequence: Synthetic oligonucleotide
  misc_feature 1..20: note = Target: ANGPTL3; (-) strand; PAM type: YTN; PAM sequence: TTG
  source 1..20: mol_type = other DNA
gtaggtgaacatagttaatc

SEQ ID NO: 11184 - DNA, 20 bp, synthetic construct
  misc_feature 1..20: note = Description of Artificial Sequence: Synthetic oligonucleotide
  misc_feature 1..20: note = Target: ANGPTL3; (-) strand; PAM type: YTN; PAM sequence: TTG
  source 1..20: mol_type = other DNA
cccagaaaaggtaaggttgg

SEQ ID NO: 11185 - DNA, 20 bp, synthetic construct
  misc_feature 1..20: note = Description of Artificial Sequence: Synthetic oligonucleotide
  misc_feature 1..20: note = Target: ANGPTL3; (-) strand; PAM type: YTN; PAM sequence: TTT
  source 1..20: mol_type = other DNA
gcccagaaaaggtaaggttg

SEQ ID NO: 11186 - DNA, 20 bp, synthetic construct
  misc_feature 1..20: note = Description of Artificial Sequence: Synthetic oligonucleotide
  misc_feature 1..20: note = Target: ANGPTL3; (-) strand; PAM type: YTN; PAM sequence: CTA
  source 1..20: mol_type = other DNA
tatataccaatatttgccca

SEQ ID NO: 11187 - DNA, 20 bp, synthetic construct
  misc_feature 1..20: note = Description of Artificial Sequence: Synthetic oligonucleotide
  misc_feature 1..20: note = Target: ANGPTL3; (-) strand; PAM type: YTN; PAM sequence: CTC
  source 1..20: mol_type = other DNA
tatatataccaatatttgcc

SEQ ID NO: 11188 - DNA, 20 bp, synthetic construct
  misc_feature 1..20: note = Description of Artificial Sequence: Synthetic oligonucleotide
  misc_feature 1..20: note = Target: ANGPTL3; (-) strand; PAM type: YTN; PAM sequence: TTA
  source 1..20: mol_type = other DNA
actctatatataccaatatt

SEQ ID NO: 11189 - DNA, 20 bp, synthetic construct
  misc_feature 1..20: note = Description of Artificial Sequence: Synthetic oligonucleotide
  misc_feature 1..20: note = Target: ANGPTL3; (-) strand; PAM type: YTN; PAM sequence: CTT
  source 1..20: mol_type = other DNA
aactctatatataccaatat

SEQ ID NO: 11190 - DNA, 20 bp, synthetic construct
  misc_feature 1..20: note = Description of Artificial Sequence: Synthetic oligonucleotide
  misc_feature 1..20: note = Target: ANGPTL3; (-) strand; PAM type: YTN; PAM sequence: TTC
  source 1..20: mol_type = other DNA
ttaactctatatataccaat

SEQ ID NO: 11191 - DNA, 20 bp, synthetic construct
  misc_feature 1..20: note = Description of Artificial Sequence: Synthetic oligonucleotide
  misc_feature 1..20: note = Target: ANGPTL3; (-) strand; PAM type: YTN; PAM sequence: CTT
  source 1..20: mol_type = other DNA
cttaactctatatataccaa

SEQ ID NO: 11192 - DNA, 20 bp, synthetic construct
  misc_feature 1..20: note = Description of Artificial Sequence: Synthetic oligonucleotide
  misc_feature 1..20: note = Target: ANGPTL3; (-) strand; PAM type: YTN; PAM sequence: CTA
  source 1..20: mol_type = other DNA
gacttcttaactctatatat

SEQ ID NO: 11193 - DNA, 20 bp, synthetic construct
  misc_feature 1..20: note = Description of Artificial Sequence: Synthetic oligonucleotide
  misc_feature 1..20: note = Target: ANGPTL3; (-) strand; PAM type: YTN; PAM sequence: CTG
  source 1..20: mol_type = other DNA
gaagcagacctagacttctt

SEQ ID NO: 11194 - DNA, 20 bp, synthetic construct
  misc_feature 1..20: note = Description of Artificial Sequence: Synthetic oligonucleotide
  misc_feature 1..20: note = Target: ANGPTL3; (-) strand; PAM type: YTN; PAM sequence: TTC
  source 1..20: mol_type = other DNA
tggaagcagacctagacttc

SEQ ID NO: 11195 - DNA, 20 bp, synthetic construct
  misc_feature 1..20: note = Description of Artificial Sequence: Synthetic oligonucleotide
  misc_feature 1..20: note = Target: ANGPTL3; (-) strand; PAM type: YTN; PAM sequence: CTT
  source 1..20: mol_type = other DNA
ctggaagcagacctagactt

SEQ ID NO: 11196 - DNA, 20 bp, synthetic construct
  misc_feature 1..20: note = Description of Artificial Sequence: Synthetic oligonucleotide
  misc_feature 1..20: note = Target: ANGPTL3; (-) strand; PAM type: YTN; PAM sequence: TTC
  source 1..20: mol_type = other DNA
ttctggaagcagacctagac

SEQ ID NO: 11197 - DNA, 20 bp, synthetic construct
  misc_feature 1..20: note = Description of Artificial Sequence: Synthetic oligonucleotide
  misc_feature 1..20: note = Target: ANGPTL3; (-) strand; PAM type: YTN; PAM sequence: TTT
  source 1..20: mol_type = other DNA
cttctggaagcagacctaga

SEQ ID NO: 11198 - DNA, 20 bp, synthetic construct
  misc_feature 1..20: note = Description of Artificial Sequence: Synthetic oligonucleotide
  misc_feature 1..20: note = Target: ANGPTL3; (-) strand; PAM type: YTN; PAM sequence: TTT
  source 1..20: mol_type = other DNA
tcttctggaagcagacctag

SEQ ID NO: 11199 - DNA, 20 bp, synthetic construct
  misc_feature 1..20: note = Description of Artificial Sequence: Synthetic oligonucleotide
  misc_feature 1..20: note = Target: ANGPTL3; (-) strand; PAM type: YTN; PAM sequence: CTG
  source 1..20: mol_type = other DNA
ttttcttctggaagcagacc

SEQ ID NO: 11200 - DNA, 20 bp, synthetic construct
  misc_feature 1..20: note = Description of Artificial Sequence: Synthetic oligonucleotide
  misc_feature 1..20: note = Target: ANGPTL3; (-) strand; PAM type: YTN; PAM sequence: TTC
  source 1..20: mol_type = other DNA
aagcaacgtggaactgtttt

SEQ ID NO: 11201 - DNA, 20 bp, synthetic construct
  misc_feature 1..20: note = Description of Artificial Sequence: Synthetic oligonucleotide
  misc_feature 1..20: note = Target: ANGPTL3; (-) strand; PAM type: YTN; PAM sequence: TTT
  source 1..20: mol_type = other DNA
caagcaacgtggaactgttt

SEQ ID NO: 11202 - DNA, 20 bp, synthetic construct
  misc_feature 1..20: note = Description of Artificial Sequence: Synthetic oligonucleotide
  misc_feature 1..20: note = Target: ANGPTL3; (-) strand; PAM type: YTN; PAM sequence: TTC
  source 1..20: mol_type = other DNA
aatttcaagcaacgtggaac

SEQ ID NO: 11203 - DNA, 20 bp, synthetic construct
  misc_feature 1..20: note = Description of Artificial Sequence: Synthetic oligonucleotide
  misc_feature 1..20: note = Target: ANGPTL3; (-) strand; PAM type: YTN; PAM sequence: TTT
  source 1..20: mol_type = other DNA
caatttcaagcaacgtggaa

SEQ ID NO: 11204 - DNA, 20 bp, synthetic construct
  misc_feature 1..20: note = Description of Artificial Sequence: Synthetic oligonucleotide
  misc_feature 1..20: note = Target: ANGPTL3; (-) strand; PAM type: YTN; PAM sequence: TTT
  source 1..20: mol_type = other DNA
tcaatttcaagcaacgtgga

SEQ ID NO: 11205 - DNA, 20 bp, synthetic construct
  misc_feature 1..20: note = Description of Artificial Sequence: Synthetic oligonucleotide
  misc_feature 1..20: note = Target: ANGPTL3; (-) strand; PAM type: YTN; PAM sequence: TTG
  source 1..20: mol_type = other DNA
attttcaatttcaagcaacg

SEQ ID NO: 11206 - DNA, 20 bp, synthetic construct
  misc_feature 1..20: note = Description of Artificial Sequence: Synthetic oligonucleotide
  misc_feature 1..20: note = Target: ANGPTL3; (-) strand; PAM type: YTN; PAM sequence: CTT
  source 1..20: mol_type = other DNA
gattttcaatttcaagcaac

SEQ ID NO: 11207 - DNA, 20 bp, synthetic construct
  misc_feature 1..20: note = Description of Artificial Sequence: Synthetic oligonucleotide
  misc_feature 1..20: note = Target: ANGPTL3; (-) strand; PAM type: YTN; PAM sequence: TTA
  source 1..20: mol_type = other DNA
tcttgattttcaatttcaag

SEQ ID NO: 11208 - DNA, 20 bp, synthetic construct
  misc_feature 1..20: note = Description of Artificial Sequence: Synthetic oligonucleotide
  misc_feature 1..20: note = Target: ANGPTL3; (-) strand; PAM type: YTN; PAM sequence: TTT
  source 1..20: mol_type = other DNA
atcttgattttcaatttcaa

SEQ ID NO: 11209 - DNA, 20 bp, synthetic construct
  misc_feature 1..20: note = Description of Artificial Sequence: Synthetic oligonucleotide
  misc_feature 1..20: note = Target: ANGPTL3; (-) strand; PAM type: YTN; PAM sequence: TTT
  source 1..20: mol_type = other DNA
tatcttgattttcaatttca

SEQ ID NO: 11210 - DNA, 20 bp, synthetic construct
  misc_feature 1..20: note = Description of Artificial Sequence: Synthetic oligonucleotide
  misc_feature 1..20: note = Target: ANGPTL3; (-) strand; PAM type: YTN; PAM sequence: TTT
  source 1..20: mol_type = other DNA
ttatcttgattttcaatttc

SEQ ID NO: 11211 - DNA, 20 bp, synthetic construct
  misc_feature 1..20: note = Description of Artificial Sequence: Synthetic oligonucleotide
  misc_feature 1..20: note = Target: ANGPTL3; (-) strand; PAM type: YTN; PAM sequence: TTG
  source 1..20: mol_type = other DNA
tgaacatttttatcttgatt

SEQ ID NO: 11212 - DNA, 20 bp, synthetic construct
  misc_feature 1..20: note = Description of Artificial Sequence: Synthetic oligonucleotide
  misc_feature 1..20: note = Target: ANGPTL3; (-) strand; PAM type: YTN; PAM sequence: TTA
  source 1..20: mol_type = other DNA
attgtgaacatttttatctt

SEQ ID NO: 11213 - DNA, 20 bp, synthetic construct
  misc_feature 1..20: note = Description of Artificial Sequence: Synthetic oligonucleotide
  misc_feature 1..20: note = Target: ANGPTL3; (-) strand; PAM type: YTN; PAM sequence: CTT
  source 1..20: mol_type = other DNA
aattgtgaacatttttatct

SEQ ID NO: 11214 - DNA, 20 bp, synthetic construct
  misc_feature 1..20: note = Description of Artificial Sequence: Synthetic oligonucleotide
  misc_feature 1..20: note = Target: ANGPTL3; (-) strand; PAM type: YTN; PAM sequence: CTA
  source 1..20: mol_type = other DNA
gaggaacaataaaaagaagg

SEQ ID NO: 11215 - DNA, 20 bp, synthetic construct
  misc_feature 1..20: note = Description of Artificial Sequence: Synthetic oligonucleotide
  misc_feature 1..20: note = Target: ANGPTL3; (-) strand; PAM type: YTN; PAM sequence: CTG
  source 1..20: mol_type = other DNA
gaggaaataactagaggaac

SEQ ID NO: 11216 - DNA, 20 bp, synthetic construct
  misc_feature 1..20: note = Description of Artificial Sequence: Synthetic oligonucleotide
  misc_feature 1..20: note = Target: ANGPTL3; (-) strand; PAM type: YTN; PAM sequence: TTC
  source 1..20: mol_type = other DNA
tggaggaaataactagagga

SEQ ID NO: 11217 - DNA, 20 bp, synthetic construct
  misc_feature 1..20: note = Description of Artificial Sequence: Synthetic oligonucleotide
  misc_feature 1..20: note = Target: ANGPTL3; (-) strand; PAM type: YTN; PAM sequence: TTG
  source 1..20: mol_type = other DNA
atcaattctggaggaaataa

SEQ ID NO: 11218 - DNA, 20 bp, synthetic construct
  misc_feature 1..20: note = Description of Artificial Sequence: Synthetic oligonucleotide
  misc_feature 1..20: note = Target: ANGPTL3; (-) strand; PAM type: YTN; PAM sequence: CTT
  source 1..20: mol_type = other DNA
gatcaattctggaggaaata

SEQ ID NO: 11219 - DNA, 20 bp, synthetic construct
  misc_feature 1..20: note = Description of Artificial Sequence: Synthetic oligonucleotide
  misc_feature 1..20: note = Target: ANGPTL3; (-) strand; PAM type: YTN; PAM sequence: TTG
  source 1..20: mol_type = other DNA
tcttgatcaattctggagga

SEQ ID NO: 11220 - DNA, 20 bp, synthetic construct
  misc_feature 1..20: note = Description of Artificial Sequence: Synthetic oligonucleotide
  misc_feature 1..20: note = Target: ANGPTL3; (-) strand; PAM type: YTN; PAM sequence: CTG
  source 1..20: mol_type = other DNA
gagatagagaatcaaatgat

SEQ ID NO: 11221 - DNA, 20 bp, synthetic construct
  misc_feature 1..20: note = Description of Artificial Sequence: Synthetic oligonucleotide
  misc_feature 1..20: note = Target: ANGPTL3; (-) strand; PAM type: YTN; PAM sequence: CTC
  source 1..20: mol_type = other DNA
tggagatagagaatcaaatg

SEQ ID NO: 11222 - DNA, 20 bp, synthetic construct
  misc_feature 1..20: note = Description of Artificial Sequence: Synthetic oligonucleotide
  misc_feature 1..20: note = Target: ANGPTL3; (-) strand; PAM type: YTN; PAM sequence: TTG
  source 1..20: mol_type = other DNA
gctctggagatagagaatca

SEQ ID NO: 11223 - DNA, 20 bp, synthetic construct
  misc_feature 1..20: note = Description of Artificial Sequence: Synthetic oligonucleotide
  misc_feature 1..20: note = Target: ANGPTL3; (-) strand; PAM type: YTN; PAM sequence: TTT
  source 1..20: mol_type = other DNA
ggctctggagatagagaatc

SEQ ID NO: 11224 - DNA, 20 bp, synthetic construct
  misc_feature 1..20: note = Description of Artificial Sequence: Synthetic oligonucleotide
  misc_feature 1..20: note = Target: ANGPTL3; (-) strand; PAM type: YTN; PAM sequence: TTT
  source 1..20: mol_type = other DNA
tggctctggagatagagaat

SEQ ID NO: 11225 - DNA, 20 bp, synthetic construct
  misc_feature 1..20: note = Description of Artificial Sequence: Synthetic oligonucleotide
  misc_feature 1..20: note = Target: ANGPTL3; (-) strand; PAM type: YTN; PAM sequence: TTG
  source 1..20: mol_type = other DNA
attttggctctggagataga

SEQ ID NO: 11226 - DNA, 20 bp, synthetic construct
  misc_feature 1..20: note = Description of Artificial Sequence: Synthetic oligonucleotide
  misc_feature 1..20: note = Target: ANGPTL3; (-) strand; PAM type: YTN; PAM sequence: CTT
  source 1..20: mol_type = other DNA
gattttggctctggagatag

SEQ ID NO: 11227 - DNA, 20 bp, synthetic construct
  misc_feature 1..20: note = Description of Artificial Sequence: Synthetic oligonucleotide
  misc_feature 1..20: note = Target: ANGPTL3; (-) strand; PAM type: YTN; PAM sequence: CTA
  source 1..20: mol_type = other DNA
acatagcaaatcttgatttt

SEQ ID NO: 11228 - DNA, 20 bp, synthetic construct
  misc_feature 1..20: note = Description of Artificial Sequence: Synthetic oligonucleotide
  misc_feature 1..20: note = Target: ANGPTL3; (-) strand; PAM type: YTN; PAM sequence: TTA
  source 1..20: mol_type = other DNA
catcgtctaacatagcaaat

SEQ ID NO: 11229 - DNA, 20 bp, synthetic construct
  misc_feature 1..20: note = Description of Artificial Sequence: Synthetic oligonucleotide
  misc_feature 1..20: note = Target: ANGPTL3; (-) strand; PAM type: YTN; PAM sequence: TTT
  source 1..20: mol_type = other DNA
acatcgtctaacatagcaaa

SEQ ID NO: 11230 - DNA, 20 bp, synthetic construct
  misc_feature 1..20: note = Description of Artificial Sequence: Synthetic oligonucleotide
  misc_feature 1..20: note = Target: ANGPTL3; (-) strand; PAM type: YTN; PAM sequence: TTT
  source 1..20: mol_type = other DNA
tacatcgtctaacatagcaa

SEQ ID NO: 11231 - DNA, 20 bp, synthetic construct
  misc_feature 1..20: note = Description of Artificial Sequence: Synthetic oligonucleotide
  misc_feature 1..20: note = Target: ANGPTL3; (-) strand; PAM type: YTN; PAM sequence: TTT
  source 1..20: mol_type = other DNA
ttacatcgtctaacatagca

SEQ ID NO: 11232 - DNA, 20 bp, synthetic construct
  misc_feature 1..20: note = Description of Artificial Sequence: Synthetic oligonucleotide
  misc_feature 1..20: note = Target: ANGPTL3; (-) strand; PAM type: YTN; PAM sequence: CTA
  source 1..20: mol_type = other DNA
aaatttttacatcgtctaac

SEQ ID NO: 11233 - DNA, 20 bp, synthetic construct
  misc_feature 1..20: note = Description of Artificial Sequence: Synthetic oligonucleotide
  misc_feature 1..20: note = Target: ANGPTL3; (-) strand; PAM type: YTN; PAM sequence: TTG
  source 1..20: mol_type = other DNA
gctaaaatttttacatcgtc

SEQ ID NO: 11234 - DNA, 20 bp, synthetic construct
  misc_feature 1..20: note = Description of Artificial Sequence: Synthetic oligonucleotide
  misc_feature 1..20: note = Target: ANGPTL3; (-) strand; PAM type: YTN; PAM sequence: CTG
  source 1..20: mol_type = other DNA
aaggaggccattggctaaaa

SEQ ID NO: 11235 - DNA, 20 bp, synthetic construct
  misc_feature 1..20: note = Description of Artificial Sequence: Synthetic oligonucleotide
  misc_feature 1..20: note = Target: ANGPTL3; (-) strand; PAM type: YTN; PAM sequence: TTA
  source 1..20: mol_type = other DNA
agaccatgtcccaactgaag

SEQ ID NO: 11236 - DNA, 20 bp, synthetic construct
  misc_feature 1..20: note = Description of Artificial Sequence: Synthetic oligonucleotide
  misc_feature 1..20: note = Target: ANGPTL3; (-) strand; PAM type: YTN; PAM sequence: TTT
  source 1..20: mol_type = other DNA
aagaccatgtcccaactgaa

SEQ ID NO: 11237 - DNA, 20 bp, synthetic construct
  misc_feature 1..20: note = Description of Artificial Sequence: Synthetic oligonucleotide
  misc_feature 1..20: note = Target: ANGPTL3; (-) strand; PAM type: YTN; PAM sequence: CTT
  source 1..20: mol_type = other DNA
taagaccatgtcccaactga

SEQ ID NO: 11238 - DNA, 20 bp, synthetic construct
  misc_feature 1..20: note = Description of Artificial Sequence: Synthetic oligonucleotide
  misc_feature 1..20: note = Target: ANGPTL3; (-) strand; PAM type: YTN; PAM sequence: TTA
  source 1..20: mol_type = other DNA
tggacaaagtctttaagacc

SEQ ID NO: 11239 - DNA, 20 bp, synthetic construct
  misc_feature 1..20: note = Description of Artificial Sequence: Synthetic oligonucleotide
  misc_feature 1..20: note = Target: ANGPTL3; (-) strand; PAM type: YTN; PAM sequence: CTT
  source 1..20: mol_type = other DNA
atggacaaagtctttaagac

SEQ ID NO: 11240 - DNA, 20 bp, synthetic construct
  misc_feature 1..20: note = Description of Artificial Sequence: Synthetic oligonucleotide
  misc_feature 1..20: note = Target: ANGPTL3; (-) strand; PAM type: YTN; PAM sequence: TTC
  source 1..20: mol_type = other DNA
gtcttatggacaaagtcttt

SEQ ID NO: 11241 - DNA, 20 bp, synthetic construct
  misc_feature 1..20: note = Description of Artificial Sequence: Synthetic oligonucleotide
  misc_feature 1..20: note = Target: ANGPTL3; (-) strand; PAM type: YTN; PAM sequence: CTT
  source 1..20: mol_type = other DNA
cgtcttatggacaaagtctt

SEQ ID NO: 11242 - DNA, 20 bp, synthetic construct
  misc_feature 1..20: note = Description of Artificial Sequence: Synthetic oligonucleotide
  misc_feature 1..20: note = Target: ANGPTL3; (-) strand; PAM type: YTN; PAM sequence: TTG
  source 1..20: mol_type = other DNA
gcccttcgtcttatggacaa

SEQ ID NO: 11243 - DNA, 20 bp, synthetic construct
  misc_feature 1..20: note = Description of Artificial Sequence: Synthetic oligonucleotide
  misc_feature 1..20: note = Target: ANGPTL3; (-) strand; PAM type: YTN; PAM sequence: TTT
  source 1..20: mol_type = other DNA
ggcccttcgtcttatggaca

SEQ ID NO: 11244 - DNA, 20 bp, synthetic construct
  misc_feature 1..20: note = Description of Artificial Sequence: Synthetic oligonucleotide
  misc_feature 1..20: note = Target: ANGPTL3; (-) strand; PAM type: YTN; PAM sequence: TTA
  source 1..20: mol_type = other DNA
atttggcccttcgtcttatg

SEQ ID NO: 11245 - DNA, 20 bp, synthetic construct
  misc_feature 1..20: note = Description of Artificial Sequence: Synthetic oligonucleotide
  misc_feature 1..20: note = Target: ANGPTL3; (-) strand; PAM type: YTN; PAM sequence: TTG
  source 1..20: mol_type = other DNA
aaatatgtcattaatttggc

SEQ ID NO: 11246 - DNA, 20 bp, synthetic construct
  misc_feature 1..20: note = Description of Artificial Sequence: Synthetic oligonucleotide
  misc_feature 1..20: note = Target: ANGPTL3; (-) strand; PAM type: YTN; PAM sequence: TTT
  source 1..20: mol_type = other DNA
gaaatatgtcattaatttgg

SEQ ID NO: 11247 - DNA, 20 bp, synthetic construct
  misc_feature 1..20: note = Description of Artificial Sequence: Synthetic oligonucleotide
  misc_feature 1..20: note = Target: ANGPTL3; (-) strand; PAM type: YTN; PAM sequence: TTT
  source 1..20: mol_type = other DNA
tgaaatatgtcattaatttg

SEQ ID NO: 11248 - DNA, 20 bp, synthetic construct
  misc_feature 1..20: note = Description of Artificial Sequence: Synthetic oligonucleotide
  misc_feature 1..20: note = Target: ANGPTL3; (-) strand; PAM type: YTN; PAM sequence: TTT
  source 1..20: mol_type = other DNA
ttgaaatatgtcattaattt

SEQ ID NO: 11249 - DNA, 20 bp, synthetic construct
  misc_feature 1..20: note = Description of Artificial Sequence: Synthetic oligonucleotide
  misc_feature 1..20: note = Target: ANGPTL3; (-) strand; PAM type: YTN; PAM sequence: TTG
  source 1..20: mol_type = other DNA
agtttttgaaatatgtcatt

SEQ ID NO: 11250 - DNA, 20 bp, synthetic construct
  misc_feature 1..20: note = Description of Artificial Sequence: Synthetic oligonucleotide
  misc_feature 1..20: note = Target: ANGPTL3; (-) strand; PAM type: YTN; PAM sequence: CTG
  source 1..20: mol_type = other DNA
atcaaatatgttgagttttt

SEQ ID NO: 11251 - DNA, 20 bp, synthetic construct
  misc_feature 1..20: note = Description of Artificial Sequence: Synthetic oligonucleotide
  misc_feature 1..20: note = Target: ANGPTL3; (-) strand; PAM type: YTN; PAM sequence: TTG
  source 1..20: mol_type = other DNA
cagcgatagatcataaaaag

SEQ ID NO: 11252 - DNA, 20 bp, synthetic construct
  misc_feature 1..20: note = Description of Artificial Sequence: Synthetic oligonucleotide
  misc_feature 1..20: note = Target: ANGPTL3; (-) strand; PAM type: YTN; PAM sequence: TTT
  source 1..20: mol_type = other DNA
gcagcgatagatcataaaaa

SEQ ID NO: 11253 - DNA, 20 bp, synthetic construct
  misc_feature 1..20: note = Description of Artificial Sequence: Synthetic oligonucleotide
  misc_feature 1..20: note = Target: ANGPTL3; (-) strand; PAM type: YTN; PAM sequence: CTG
  source 1..20: mol_type = other DNA
gtttgcagcgatagatcata

SEQ ID NO: 11254 - DNA, 20 bp, synthetic construct
  misc_feature 1..20: note = Description of Artificial Sequence: Synthetic oligonucleotide
  misc_feature 1..20: note = Target: ANGPTL3; (-) strand; PAM type: YTN; PAM sequence: TTC
  source 1..20: mol_type = other DNA
actggtttgcagcgatagat

SEQ ID NO: 11255 - DNA, 20 bp, synthetic construct
  misc_feature 1..20: note = Description of Artificial Sequence: Synthetic oligonucleotide
  misc_feature 1..20: note = Target: ANGPTL3; (-) strand; PAM type: YTN; PAM sequence: TTT
  source 1..20: mol_type = other DNA
cactggtttgcagcgataga

SEQ ID NO: 11256 - DNA, 20 bp, synthetic construct
  misc_feature 1..20: note = Description of Artificial Sequence: Synthetic oligonucleotide
  misc_feature 1..20: note = Target: ANGPTL3; (-) strand; PAM type: YTN; PAM sequence: TTG
  source 1..20: mol_type = other DNA
atttcactggtttgcagcga

SEQ ID NO: 11257 - DNA, 20 bp, synthetic construct
  misc_feature 1..20: note = Description of Artificial Sequence: Synthetic oligonucleotide
  misc_feature 1..20: note = Target: ANGPTL3; (-) strand; PAM type: YTN; PAM sequence: TTT
  source 1..20: mol_type = other DNA
gatttcactggtttgcagcg

SEQ ID NO: 11258 - DNA, 20 bp, synthetic construct
  misc_feature 1..20: note = Description of Artificial Sequence: Synthetic oligonucleotide
  misc_feature 1..20: note = Target: ANGPTL3; (-) strand; PAM type: YTN; PAM sequence: CTT
  source 1..20: mol_type = other DNA
tgatttcactggtttgcagc

SEQ ID NO: 11259 - DNA, 20 bp, synthetic construct
  misc_feature 1..20: note = Description of Artificial Sequence: Synthetic oligonucleotide
  misc_feature 1..20: note = Target: ANGPTL3; (-) strand; PAM type: YTN; PAM sequence: TTC
  source 1..20: mol_type = other DNA
tttgatttcactggtttgca

SEQ ID NO: 11260 - DNA, 20 bp, synthetic construct
  misc_feature 1..20: note = Description of Artificial Sequence: Synthetic oligonucleotide
  misc_feature 1..20: note = Target: ANGPTL3; (-) strand; PAM type: YTN; PAM sequence: CTT
  source 1..20: mol_type = other DNA
ctttgatttcactggtttgc

SEQ ID NO: 11261 - DNA, 20 bp, synthetic construct
  misc_feature 1..20: note = Description of Artificial Sequence: Synthetic oligonucleotide
  misc_feature 1..20: note = Target: ANGPTL3; (-) strand; PAM type: YTN; PAM sequence: TTC
  source 1..20: mol_type = other DNA
ttctttgatttcactggttt

SEQ ID NO: 11262 - DNA, 20 bp, synthetic construct
  misc_feature 1..20: note = Description of Artificial Sequence: Synthetic oligonucleotide
  misc_feature 1..20: note = Target: ANGPTL3; (-) strand; PAM type: YTN; PAM sequence: CTT
  source 1..20: mol_type = other DNA
cttctttgatttcactggtt

SEQ ID NO: 11263 - DNA, 20 bp, synthetic construct
  misc_feature 1..20: note = Description of Artificial Sequence: Synthetic oligonucleotide
  misc_feature 1..20: note = Target: ANGPTL3; (-) strand; PAM type: YTN; PAM sequence: TTC
  source 1..20: mol_type = other DNA
ttcttctttgatttcactgg

SEQ ID NO: 11264 - DNA, 20 bp, synthetic construct
  misc_feature 1..20: note = Description of Artificial Sequence: Synthetic oligonucleotide
  misc_feature 1..20: note = Target: ANGPTL3; (-) strand; PAM type: YTN; PAM sequence: TTT
  source 1..20: mol_type = other DNA
cttcttctttgatttcactg

SEQ ID NO: 11265 - DNA, 20 bp, synthetic construct
  misc_feature 1..20: note = Description of Artificial Sequence: Synthetic oligonucleotide
  misc_feature 1..20: note = Target: ANGPTL3; (-) strand; PAM type: YTN; PAM sequence: TTT
  source 1..20: mol_type = other DNA
tcttcttctttgatttcact

SEQ ID NO: 11266 - DNA, 20 bp, synthetic construct
  misc_feature 1..20: note = Description of Artificial Sequence: Synthetic oligonucleotide
  misc_feature 1..20: note = Target: ANGPTL3; (-) strand; PAM type: YTN; PAM sequence: CTT
  source 1..20: mol_type = other DNA
ttcttcttctttgatttcac

SEQ ID NO: 11267 - DNA, 20 bp, synthetic construct
  misc_feature 1..20: note = Description of Artificial Sequence: Synthetic oligonucleotide
  misc_feature 1..20: note = Target: ANGPTL3; (-) strand; PAM type: YTN; PAM sequence: TTC
  source 1..20: mol_type = other DNA
cttttcttcttctttgattt

SEQ ID NO: 11268 - DNA, 20 bp, synthetic construct
  misc_feature 1..20: note = Description of Artificial Sequence: Synthetic oligonucleotide
  misc_feature 1..20: note = Target: ANGPTL3; (-) strand; PAM type: YTN; PAM sequence: CTC
  source 1..20: mol_type = other DNA
agttccttttcttcttcttt

SEQ ID NO: 11269 - DNA, 20 bp, synthetic construct
  misc_feature 1..20: note = Description of Artificial Sequence: Synthetic oligonucleotide
  misc_feature 1..20: note = Target: ANGPTL3; (-) strand; PAM type: YTN; PAM sequence: TTC
  source 1..20: mol_type = other DNA
tcagttccttttcttcttct

SEQ ID NO: 11270 - DNA, 20 bp, synthetic construct
  misc_feature 1..20: note = Description of Artificial Sequence: Synthetic oligonucleotide
  misc_feature 1..20: note = Target: ANGPTL3; (-) strand; PAM type: YTN; PAM sequence: CTT
  source 1..20: mol_type = other DNA
ctcagttccttttcttcttc

SEQ ID NO: 11271 - DNA, 20 bp, synthetic construct
  misc_feature 1..20: note = Description of Artificial Sequence: Synthetic oligonucleotide
  misc_feature 1..20: note = Target: ANGPTL3; (-) strand; PAM type: YTN; PAM sequence: TTC
  source 1..20: mol_type = other DNA
ttctcagttccttttcttct

SEQ ID NO: 11272 - DNA, 20 bp, synthetic construct
  misc_feature 1..20: note = Description of Artificial Sequence: Synthetic oligonucleotide
  misc_feature 1..20: note = Target: ANGPTL3; (-) strand; PAM type: YTN; PAM sequence: TTA
  source 1..20: mol_type = other DNA
tatgtagttcttctcagttc

SEQ ID NO: 11273 - DNA, 20 bp, synthetic construct
  misc_feature 1..20: note = Description of Artificial Sequence: Synthetic oligonucleotide
  misc_feature 1..20: note = Target: ANGPTL3; (-) strand; PAM type: YTN; PAM sequence: TTT
  source 1..20: mol_type = other DNA
atatgtagttcttctcagtt

SEQ ID NO: 11274 - DNA, 20 bp, synthetic construct
  misc_feature 1..20: note = Description of Artificial Sequence: Synthetic oligonucleotide
  misc_feature 1..20: note = Target: ANGPTL3; (-) strand; PAM type: YTN; PAM sequence: TTG
  source 1..20: mol_type = other DNA
tagtttatatgtagttcttc

SEQ ID NO: 11275 - DNA, 20 bp, synthetic construct
  misc_feature 1..20: note = Description of Artificial Sequence: Synthetic oligonucleotide
  misc_feature 1..20: note = Target: ANGPTL3; (-) strand; PAM type: YTN; PAM sequence: CTT
  source 1..20: mol_type = other DNA
gtagtttatatgtagttctt

SEQ ID NO: 11276 - DNA, 20 bp, synthetic construct
  misc_feature 1..20: note = Description of Artificial Sequence: Synthetic oligonucleotide
  misc_feature 1..20: note = Target: ANGPTL3; (-) strand; PAM type: YTN; PAM sequence: TTG
  source 1..20: mol_type = other DNA
acttgtagtttatatgtagt

SEQ ID NO: 11277 - DNA, 20 bp, synthetic construct
  misc_feature 1..20: note = Description of Artificial Sequence: Synthetic oligonucleotide
  misc_feature 1..20: note = Target: ANGPTL3; (-) strand; PAM type: YTN; PAM sequence: TTT
  source 1..20: mol_type = other DNA
gacttgtagtttatatgtag

SEQ ID NO: 11278 - DNA, 20 bp, synthetic construct
  misc_feature 1..20: note = Description of Artificial Sequence: Synthetic oligonucleotide
  misc_feature 1..20: note = Target: ANGPTL3; (-) strand; PAM type: YTN; PAM sequence: TTT
  source 1..20: mol_type = other DNA
tgacttgtagtttatatgta

SEQ ID NO: 11279 - DNA, 20 bp, synthetic construct
  misc_feature 1..20: note = Description of Artificial Sequence: Synthetic oligonucleotide
  misc_feature 1..20: note = Target: ANGPTL3; (-) strand; PAM type: YTN; PAM sequence: TTT
  source 1..20: mol_type = other DNA
ttgacttgtagtttatatgt

SEQ ID NO: 11280 - DNA, 20 bp, synthetic construct
  misc_feature 1..20: note = Description of Artificial Sequence: Synthetic oligonucleotide
  misc_feature 1..20: note = Target: ANGPTL3; (-) strand; PAM type: YTN; PAM sequence: TTC
  source 1..20: mol_type = other DNA
atttttgacttgtagtttat

SEQ ID NO: 11281 - DNA, 20 bp, synthetic construct
  misc_feature 1..20: note = Description of Artificial Sequence: Synthetic oligonucleotide
  misc_feature 1..20: note = Target: ANGPTL3; (-) strand; PAM type: YTN; PAM sequence: CTT
  source 1..20: mol_type = other DNA
catttttgacttgtagttta

SEQ ID NO: 11282 - DNA, 20 bp, synthetic construct
  misc_feature 1..20: note = Description of Artificial Sequence: Synthetic oligonucleotide
  misc_feature 1..20: note = Target: ANGPTL3; (-) strand; PAM type: YTN; PAM sequence: CTC
  source 1..20: mol_type = other DNA
ttcatttttgacttgtagtt

SEQ ID NO: 11283 - DNA, 20 bp, synthetic construct
  misc_feature 1..20: note = Description of Artificial Sequence: Synthetic oligonucleotide
  misc_feature 1..20: note = Target: ANGPTL3; (-) strand; PAM type: YTN; PAM sequence: TTA
  source 1..20: mol_type = other DNA
cctcttcatttttgacttgt

SEQ ID NO: 11284 - DNA, 20 bp, synthetic construct
  misc_feature 1..20: note = Description of Artificial Sequence: Synthetic oligonucleotide
  misc_feature 1..20: note = Target: ANGPTL3; (-) strand; PAM type: YTN; PAM sequence: TTT
  source 1..20: mol_type = other DNA
acctcttcatttttgacttg

SEQ ID NO: 11285 - DNA, 20 bp, synthetic construct
  misc_feature 1..20: note = Description of Artificial Sequence: Synthetic oligonucleotide
  misc_feature 1..20: note = Target: ANGPTL3; (-) strand; PAM type: YTN; PAM sequence: CTT
  source 1..20: mol_type = other DNA
tacctcttcatttttgactt

SEQ ID NO: 11286 - DNA, 20 bp, synthetic construct
  misc_feature 1..20: note = Description of Artificial Sequence: Synthetic oligonucleotide
  misc_feature 1..20: note = Target: ANGPTL3; (-) strand; PAM type: YTN; PAM sequence: TTC
  source 1..20: mol_type = other DNA
tttacctcttcatttttgac

SEQ ID NO: 11287 - DNA, 20 bp, synthetic construct
  misc_feature 1..20: note = Description of Artificial Sequence: Synthetic oligonucleotide
  misc_feature 1..20: note = Target: ANGPTL3; (-) strand; PAM type: YTN; PAM sequence: TTC
  source 1..20: mol_type = other DNA
aagtgacatattctttacct

SEQ ID NO: 11288 - DNA, 20 bp, synthetic construct
  misc_feature 1..20: note = Description of Artificial Sequence: Synthetic oligonucleotide
  misc_feature 1..20: note = Target: ANGPTL3; (-) strand; PAM type: YTN; PAM sequence: TTG
  source 1..20: mol_type = other DNA
agttcaagtgacatattctt

SEQ ID NO: 11289 - DNA, 20 bp, synthetic construct
  misc_feature 1..20: note = Description of Artificial Sequence: Synthetic oligonucleotide
  misc_feature 1..20: note = Target: ANGPTL3; (-) strand; PAM type: YTN; PAM sequence: TTG
  source 1..20: mol_type = other DNA
agttgagttcaagtgacata

SEQ ID NO: 11290 - DNA, 20 bp, synthetic construct
  misc_feature 1..20: note = Description of Artificial Sequence: Synthetic oligonucleotide
  misc_feature 1..20: note = Target: ANGPTL3; (-) strand; PAM type: YTN; PAM sequence: TTT
  source 1..20: mol_type = other DNA
gagttgagttcaagtgacat

SEQ ID NO: 11291 - DNA, 20 bp, synthetic construct
  misc_feature 1..20: note = Description of Artificial Sequence: Synthetic oligonucleotide
  misc_feature 1..20: note = Target: ANGPTL3; (-) strand; PAM type: YTN; PAM sequence: TTT
  source 1..20: mol_type = other DNA
tgagttgagttcaagtgaca

SEQ ID NO: 11292 - DNA, 20 bp, synthetic construct
  misc_feature 1..20: note = Description of Artificial Sequence: Synthetic oligonucleotide
  misc_feature 1..20: note = Target: ANGPTL3; (-) strand; PAM type: YTN; PAM sequence: TTC
  source 1..20: mol_type = other DNA
aagttttgagttgagttcaa

SEQ ID NO: 11293 - DNA, 20 bp, synthetic construct
  misc_feature 1..20: note = Description of Artificial Sequence: Synthetic oligonucleotide
  misc_feature 1..20: note = Target: ANGPTL3; (-) strand; PAM type: YTN; PAM sequence: TTT
  source 1..20: mol_type = other DNA
caagttttgagttgagttca

SEQ ID NO: 11294 - DNA, 20 bp, synthetic construct
  misc_feature 1..20: note = Description of Artificial Sequence: Synthetic oligonucleotide
  misc_feature 1..20: note = Target: ANGPTL3; (-) strand; PAM type: YTN; PAM sequence: CTT
  source 1..20: mol_type = other DNA
tcaagttttgagttgagttc

SEQ ID NO: 11295 - DNA, 20 bp, synthetic construct
  misc_feature 1..20: note = Description of Artificial Sequence: Synthetic oligonucleotide
  misc_feature 1..20: note = Target: ANGPTL3; (-) strand; PAM type: YTN; PAM sequence: CTA
  source 1..20: mol_type = other DNA
ggaggctttcaagttttgag

SEQ ID NO: 11296 - DNA, 20 bp, synthetic construct
  misc_feature 1..20: note = Description of Artificial Sequence: Synthetic oligonucleotide
  misc_feature 1..20: note = Target: ANGPTL3; (-) strand; PAM type: YTN; PAM sequence: TTC
  source 1..20: mol_type = other DNA
taggaggctttcaagttttg

SEQ ID NO: 11297 - DNA, 20 bp, synthetic construct
  misc_feature 1..20: note = Description of Artificial Sequence: Synthetic oligonucleotide
  misc_feature 1..20: note = Target: ANGPTL3; (-) strand; PAM type: YTN; PAM sequence: CTT
  source 1..20: mol_type = other DNA
ctaggaggctttcaagtttt

SEQ ID NO: 11298 - DNA, 20 bp, synthetic construct
  misc_feature 1..20: note = Description of Artificial Sequence: Synthetic oligonucleotide
  misc_feature 1..20: note = Target: ANGPTL3; (-) strand; PAM type: YTN; PAM sequence: TTC
  source 1..20: mol_type = other DNA
ttctaggaggctttcaagtt

SEQ ID NO: 11299 - DNA, 20 bp, synthetic construct
  misc_feature 1..20: note = Description of Artificial Sequence: Synthetic oligonucleotide
  misc_feature 1..20: note = Target: ANGPTL3; (-) strand; PAM type: YTN; PAM sequence: TTT
  source 1..20: mol_type = other DNA
cttctaggaggctttcaagt

SEQ ID NO: 11300 - DNA, 20 bp, synthetic construct
  misc_feature 1..20: note = Description of Artificial Sequence: Synthetic oligonucleotide
  misc_feature 1..20: note = Target: ANGPTL3; (-) strand; PAM type: YTN; PAM sequence: TTT
  source 1..20: mol_type = other DNA
tcttctaggaggctttcaag

SEQ ID NO: 11301 - DNA, 20 bp, synthetic construct
  misc_feature 1..20: note = Description of Artificial Sequence: Synthetic oligonucleotide
  misc_feature 1..20: note = Target: ANGPTL3; (-) strand; PAM type: YTN; PAM sequence: TTT
  source 1..20: mol_type = other DNA
ttcttctaggaggctttcaa

SEQ ID NO: 11302 - DNA, 20 bp, synthetic construct
  misc_feature 1..20: note = Description of Artificial Sequence: Synthetic oligonucleotide
  misc_feature 1..20: note = Target: ANGPTL3; (-) strand; PAM type: YTN; PAM sequence: TTT
  source 1..20: mol_type = other DNA
tttcttctaggaggctttca

SEQ ID NO: 11303 - DNA, 20 bp, synthetic construct
  misc_feature 1..20: note = Description of Artificial Sequence: Synthetic oligonucleotide
  misc_feature 1..20: note = Target: ANGPTL3; (-) strand; PAM type: YTN; PAM sequence: TTG
  source 1..20: mol_type = other DNA
aagtagaattttttcttcta

SEQ ID NO: 11304 - DNA, 20 bp, synthetic construct
  misc_feature 1..20: note = Description of Artificial Sequence: Synthetic oligonucleotide
  misc_feature 1..20: note = Target: ANGPTL3; (-) strand; PAM type: YTN; PAM sequence: TTG
  source 1..20: mol_type = other DNA
ttgaagtagaattttttctt

SEQ ID NO: 11305 - DNA, 20 bp, synthetic construct
  misc_feature 1..20: note = Description of Artificial Sequence: Synthetic oligonucleotide
  misc_feature 1..20: note = Target: ANGPTL3; (-) strand; PAM type: YTN; PAM sequence: TTT
  source 1..20: mol_type = other DNA
gttgaagtagaattttttct

SEQ ID NO: 11306 - DNA, 20 bp, synthetic construct
  misc_feature 1..20: note = Description of Artificial Sequence: Synthetic oligonucleotide
  misc_feature 1..20: note = Target: ANGPTL3; (-) strand; PAM type: YTN; PAM sequence: TTT
  source 1..20: mol_type = other DNA
tgttgaagtagaattttttc

SEQ ID NO: 11307 - DNA, 20 bp, synthetic construct
  misc_feature 1..20: note = Description of Artificial Sequence: Synthetic oligonucleotide
  misc_feature 1..20: note = Target: ANGPTL3; (-) strand; PAM type: YTN; PAM sequence: TTT
  source 1..20: mol_type = other DNA
ttgttgaagtagaatttttt

SEQ ID NO: 11308 - DNA, 20 bp, synthetic construct
  misc_feature 1..20: note = Description of Artificial Sequence: Synthetic oligonucleotide
  misc_feature 1..20: note = Target: ANGPTL3; (-) strand; PAM type: YTN; PAM sequence: CTT
  source 1..20: mol_type = other DNA
tttgttgaagtagaattttt

SEQ ID NO: 11309 - DNA, 20 bp, synthetic construct
  misc_feature 1..20: note = Description of Artificial Sequence: Synthetic oligonucleotide
  misc_feature 1..20: note = Target: ANGPTL3; (-) strand; PAM type: YTN; PAM sequence: TTC
  source 1..20: mol_type = other DNA
actttttgttgaagtagaat

SEQ ID NO: 11310 - DNA, 20 bp, synthetic construct
  misc_feature 1..20: note = Description of Artificial Sequence: Synthetic oligonucleotide
  misc_feature 1..20: note = Target: ANGPTL3; (-) strand; PAM type: YTN; PAM sequence: TTT
  source 1..20: mol_type = other DNA
cactttttgttgaagtagaa

SEQ ID NO: 11311 - DNA, 20 bp, synthetic construct
  misc_feature 1..20: note = Description of Artificial Sequence: Synthetic oligonucleotide
  misc_feature 1..20: note = Target: ANGPTL3; (-) strand; PAM type: YTN; PAM sequence: CTA
  source 1..20: mol_type = other DNA
aatatttcactttttgttga

SEQ ID NO: 11312 - DNA, 20 bp, synthetic construct
  misc_feature 1..20: note = Description of Artificial Sequence: Synthetic oligonucleotide
  misc_feature 1..20: note = Target: ANGPTL3; (-) strand; PAM type: YTN; PAM sequence: TTC
  source 1..20: mol_type = other DNA
taaatatttcactttttgtt

SEQ ID NO: 11313 - DNA, 20 bp, synthetic construct
  misc_feature 1..20: note = Description of Artificial Sequence: Synthetic oligonucleotide
  misc_feature 1..20: note = Target: ANGPTL3; (-) strand; PAM type: YTN; PAM sequence: CTT
  source 1..20: mol_type = other DNA
ctaaatatttcactttttgt

SEQ ID NO: 11314 - DNA, 20 bp, synthetic construct
  misc_feature 1..20: note = Description of Artificial Sequence: Synthetic oligonucleotide
  misc_feature 1..20: note = Target: ANGPTL3; (-) strand; PAM type: YTN; PAM sequence: CTC
  source 1..20: mol_type = other DNA
ttctaaatatttcacttttt

SEQ ID NO: 11315 - DNA, 20 bp, synthetic construct
  misc_feature 1..20: note = Description of Artificial Sequence: Synthetic oligonucleotide
  misc_feature 1..20: note = Target: ANGPTL3; (-) strand; PAM type: YTN; PAM sequence: TTG
  source 1..20: mol_type = other DNA
ctcttctaaatatttcactt

SEQ ID NO: 11316 - DNA, 20 bp, synthetic construct
  misc_feature 1..20: note = Description of Artificial Sequence: Synthetic oligonucleotide
  misc_feature 1..20: note = Target: ANGPTL3; (-) strand; PAM type: YTN; PAM sequence: TTA
  source 1..20: mol_type = other DNA
gttgctcttctaaatatttc

SEQ ID NO: 11317 - DNA, 20 bp, synthetic construct
  misc_feature 1..20: note = Description of Artificial Sequence: Synthetic oligonucleotide
  misc_feature 1..20: note = Target: ANGPTL3; (-) strand; PAM type: YTN; PAM sequence: TTA
  source 1..20: mol_type = other DNA
gttagttgctcttctaaata

SEQ ID NO: 11318 - DNA, 20 bp, synthetic construct
  misc_feature 1..20: note = Description of Artificial Sequence: Synthetic oligonucleotide
  misc_feature 1..20: note = Target: ANGPTL3; (-) strand; PAM type: YTN; PAM sequence: TTA
  source 1..20: mol_type = other DNA
agttagttagttgctcttct

SEQ ID NO: 11319 - DNA, 20 bp, synthetic construct
  misc_feature 1..20: note = Description of Artificial Sequence: Synthetic oligonucleotide
  misc_feature 1..20: note = Target: ANGPTL3; (-) strand; PAM type: YTN; PAM sequence: TTG
  source 1..20: mol_type = other DNA
aattaagttagttagttgct

SEQ ID NO: 11320 - DNA, 20 bp, synthetic construct
  misc_feature 1..20: note = Description of Artificial Sequence: Synthetic oligonucleotide
  misc_feature 1..20: note = Target: ANGPTL3; (-) strand; PAM type: YTN; PAM sequence: TTT
  source 1..20: mol_type = other DNA
gaattaagttagttagttgc

SEQ ID NO: 11321 - DNA, 20 bp, synthetic construct
  misc_feature 1..20: note = Description of Artificial Sequence: Synthetic oligonucleotide
  misc_feature 1..20: note = Target: ANGPTL3; (-) strand; PAM type: YTN; PAM sequence: TTT
  source 1..20: mol_type = other DNA
tgaattaagttagttagttg

SEQ ID NO: 11322 - DNA, 20 bp, synthetic construct
  misc_feature 1..20: note = Description of Artificial Sequence: Synthetic oligonucleotide
  misc_feature 1..20: note = Target: ANGPTL3; (-) strand; PAM type: YTN; PAM sequence: TTG
  source 1..20: mol_type = other DNA
attttgaattaagttagtta

SEQ ID NO: 11323 - DNA, 20 bp, synthetic construct
  misc_feature 1..20: note = Description of Artificial Sequence: Synthetic oligonucleotide
  misc_feature 1..20: note = Target: ANGPTL3; (-) strand; PAM type: YTN; PAM sequence: TTC
  source 1..20: mol_type = other DNA
aggttgattttgaattaagt

SEQ ID NO: 11324 - DNA, 20 bp, synthetic construct
  misc_feature 1..20: note = Description of Artificial Sequence: Synthetic oligonucleotide
  misc_feature 1..20: note = Target: ANGPTL3; (-) strand; PAM type: YTN; PAM sequence: TTT
  source 1..20: mol_type = other DNA
caggttgattttgaattaag

SEQ ID NO: 11325 - DNA, 20 bp, synthetic construct
  misc_feature 1..20: note = Description of Artificial Sequence: Synthetic oligonucleotide
  misc_feature 1..20: note = Target: ANGPTL3; (-) strand; PAM type: YTN; PAM sequence: CTG
  source 1..20: mol_type = other DNA
gagtttcaggttgattttga

SEQ ID NO: 11326 - DNA, 20 bp, synthetic construct
  misc_feature 1..20: note = Description of Artificial Sequence: Synthetic oligonucleotide
  misc_feature 1..20: note = Target: ANGPTL3; (-) strand; PAM type: YTN; PAM sequence: TTC
  source 1..20: mol_type = other DNA
tggagtttcaggttgatttt

SEQ ID NO: 11327 - DNA, 20 bp, synthetic construct
  misc_feature 1..20: note = Description of Artificial Sequence: Synthetic oligonucleotide
  misc_feature 1..20: note = Target: ANGPTL3; (-) strand; PAM type: YTN; PAM sequence: CTG
  source 1..20: mol_type = other DNA
ggtgttctggagtttcaggt

SEQ ID NO: 11328 - DNA, 20 bp, synthetic construct
  misc_feature 1..20: note = Description of Artificial Sequence: Synthetic oligonucleotide
  misc_feature 1..20: note = Target: ANGPTL3; (-) strand; PAM type: YTN; PAM sequence: TTC
  source 1..20: mol_type = other DNA
tgggtgttctggagtttcag

SEQ ID NO: 11329 - DNA, 20 bp, synthetic construct
  misc_feature 1..20: note = Description of Artificial Sequence: Synthetic oligonucleotide
  misc_feature 1..20: note = Target: ANGPTL3; (-) strand; PAM type: YTN; PAM sequence: CTT
  source 1..20: mol_type = other DNA
ctgggtgttctggagtttca

SEQ ID NO: 11330 - DNA, 20 bp, synthetic construct
  misc_feature 1..20: note = Description of Artificial Sequence: Synthetic oligonucleotide
  misc_feature 1..20: note = Target: ANGPTL3; (-) strand; PAM type: YTN; PAM sequence: TTA
  source 1..20: mol_type = other DNA
cttctgggtgttctggagtt

SEQ ID NO: 11331 - DNA, 20 bp, synthetic construct
  misc_feature 1..20: note = Description of Artificial Sequence: Synthetic oligonucleotide
  misc_feature 1..20: note = Target: ANGPTL3; (-) strand; PAM type: YTN; PAM sequence: TTA
  source 1..20: mol_type = other DNA
agtgaagttacttctgggtg

SEQ ID NO: 11332 - DNA, 20 bp, synthetic construct
  misc_feature 1..20: note = Description of Artificial Sequence: Synthetic oligonucleotide
  misc_feature 1..20: note = Target: ANGPTL3; (-) strand; PAM type: YTN; PAM sequence: TTT
  source 1..20: mol_type = other DNA
aagtgaagttacttctgggt

SEQ ID NO: 11333 - DNA, 20 bp, synthetic construct
  misc_feature 1..20: note = Description of Artificial Sequence: Synthetic oligonucleotide
  misc_feature 1..20: note = Target: ANGPTL3; (-) strand; PAM type: YTN; PAM sequence: CTT
  source 1..20: mol_type = other DNA
taagtgaagttacttctggg

SEQ ID NO: 11334 - DNA, 20 bp, synthetic construct
  misc_feature 1..20: note = Description of Artificial Sequence: Synthetic oligonucleotide
  misc_feature 1..20: note = Target: ANGPTL3; (-) strand; PAM type: YTN; PAM sequence: TTA
  source 1..20: mol_type = other DNA
ctttaagtgaagttacttct

SEQ ID NO: 11335 - DNA, 20 bp, synthetic construct
  misc_feature 1..20: note = Description of Artificial Sequence: Synthetic oligonucleotide
  misc_feature 1..20: note = Target: ANGPTL3; (-) strand; PAM type: YTN; PAM sequence: CTT
  source 1..20: mol_type = other DNA
actttaagtgaagttacttc

SEQ ID NO: 11336 - DNA, 20 bp, synthetic construct
  misc_feature 1..20: note = Description of Artificial Sequence: Synthetic oligonucleotide
  misc_feature 1..20: note = Target: ANGPTL3; (-) strand; PAM type: YTN; PAM sequence: CTA
  source 1..20: mol_type = other DNA
cttactttaagtgaagttac

SEQ ID NO: 11337 - DNA, 20 bp, synthetic construct
  misc_feature 1..20: note = Description of Artificial Sequence: Synthetic oligonucleotide
  misc_feature 1..20: note = Target: ANGPTL3; (-) strand; PAM type: YTN; PAM sequence: TTC
  source 1..20: mol_type = other DNA
tacttactttaagtgaagtt

SEQ ID NO: 11338 - DNA, 20 bp, synthetic construct
  misc_feature 1..20: note = Description of Artificial Sequence: Synthetic oligonucleotide
  misc_feature 1..20: note = Target: ANGPTL3; (-) strand; PAM type: YTN; PAM sequence: TTT
  source 1..20: mol_type = other DNA
ctacttactttaagtgaagt

SEQ ID NO: 11339 - DNA, 20 bp, synthetic construct
  misc_feature 1..20: note = Description of Artificial Sequence: Synthetic oligonucleotide
  misc_feature 1..20: note = Target: ANGPTL3; (-) strand; PAM type: YTN; PAM sequence: TTT
  source 1..20: mol_type = other DNA
tctacttactttaagtgaag

SEQ ID NO: 11340 - DNA, 20 bp, synthetic construct
  misc_feature 1..20: note = Description of Artificial Sequence: Synthetic oligonucleotide
  misc_feature 1..20: note = Target: ANGPTL3; (-) strand; PAM type: YTN; PAM sequence: TTA
  source 1..20: mol_type = other DNA
ttttctacttactttaagtg

SEQ ID NO: 11341 - DNA, 20 bp, synthetic construct
  misc_feature 1..20: note = Description of Artificial Sequence: Synthetic oligonucleotide
  misc_feature 1..20: note = Target: ANGPTL3; (-) strand; PAM type: YTN; PAM sequence: TTT
  source 1..20: mol_type = other DNA
attttctacttactttaagt

SEQ ID NO: 11342 - DNA, 20 bp, synthetic construct
  misc_feature 1..20: note = Description of Artificial Sequence: Synthetic oligonucleotide
  misc_feature 1..20: note = Target: ANGPTL3; (-) strand; PAM type: YTN; PAM sequence: CTT
  source 1..20: mol_type = other DNA
tattttctacttactttaag

SEQ ID NO: 11343 - DNA, 20 bp, synthetic construct
  misc_feature 1..20: note = Description of Artificial Sequence: Synthetic oligonucleotide
  misc_feature 1..20: note = Target: ANGPTL3; (-) strand; PAM type: YTN; PAM sequence: CTC
  source 1..20: mol_type = other DNA
tttattttctacttacttta

SEQ ID NO: 11344 - DNA, 20 bp, synthetic construct
  misc_feature 1..20: note = Description of Artificial Sequence: Synthetic oligonucleotide
  misc_feature 1..20: note = Target: ANGPTL3; (-) strand; PAM type: YTN; PAM sequence: TTG
  source 1..20: mol_type = other DNA
aaaacataaacatgaaccct

SEQ ID NO: 11345 - DNA, 20 bp, synthetic construct
  misc_feature 1..20: note = Description of Artificial Sequence: Synthetic oligonucleotide
  misc_feature 1..20: note = Target: ANGPTL3; (-) strand; PAM type: YTN; PAM sequence: TTA
  source 1..20: mol_type = other DNA
aaagatccacattgaaaaca

SEQ ID NO: 11346 - DNA, 20 bp, synthetic construct
  misc_feature 1..20: note = Description of Artificial Sequence: Synthetic oligonucleotide
  misc_feature 1..20: note = Target: ANGPTL3; (-) strand; PAM type: YTN; PAM sequence: TTT
  source 1..20: mol_type = other DNA
aaaagatccacattgaaaac

SEQ ID NO: 11347 - DNA, 20 bp, synthetic construct
  misc_feature 1..20: note = Description of Artificial Sequence: Synthetic oligonucleotide
  misc_feature 1..20: note = Target: ANGPTL3; (-) strand; PAM type: YTN; PAM sequence: TTT
  source 1..20: mol_type = other DNA
taaaagatccacattgaaaa

SEQ ID NO: 11348 - DNA, 20 bp, synthetic construct
  misc_feature 1..20: note = Description of Artificial Sequence: Synthetic oligonucleotide
  misc_feature 1..20: note = Target: ANGPTL3; (-) strand; PAM type: YTN; PAM sequence: TTT
  source 1..20: mol_type = other DNA
ttaaaagatccacattgaaa

SEQ ID NO: 11349 - DNA, 20 bp, synthetic construct
  misc_feature 1..20: note = Description of Artificial Sequence: Synthetic oligonucleotide
  misc_feature 1..20: note = Target: ANGPTL3; (-) strand; PAM type: YTN; PAM sequence: TTT
  source 1..20: mol_type = other DNA
tttaaaagatccacattgaa

SEQ ID NO: 11350 - DNA, 20 bp, synthetic construct
  misc_feature 1..20: note = Description of Artificial Sequence: Synthetic oligonucleotide
  misc_feature 1..20: note = Target: ANGPTL3; (-) strand; PAM type: YTN; PAM sequence: TTT
  source 1..20: mol_type = other DNA
ttttaaaagatccacattga

SEQ ID NO: 11351 - DNA, 20 bp, synthetic construct
  misc_feature 1..20: note = Description of Artificial Sequence: Synthetic oligonucleotide
  misc_feature 1..20: note = Target: ANGPTL3; (-) strand; PAM type: YTN; PAM sequence: TTT
  source 1..20: mol_type = other DNA
tttttaaaagatccacattg

SEQ ID NO: 11352 - DNA, 20 bp, synthetic construct
  misc_feature 1..20: note = Description of Artificial Sequence: Synthetic oligonucleotide
  misc_feature 1..20: note = Target: ANGPTL3; (-) strand; PAM type: YTN; PAM sequence: TTA
  source 1..20: mol_type = other DNA
gaaatattttttttaaaaga

SEQ ID NO: 11353 - DNA, 20 bp, synthetic construct
  misc_feature 1..20: note = Description of Artificial Sequence: Synthetic oligonucleotide
  misc_feature 1..20: note = Target: ANGPTL3; (-) strand; PAM type: YTN; PAM sequence: CTT
  source 1..20: mol_type = other DNA
agaaatattttttttaaaag

SEQ ID NO: 11354 - DNA, 20 bp, synthetic construct
  misc_feature 1..20: note = Description of Artificial Sequence: Synthetic oligonucleotide
  misc_feature 1..20: note = Target: ANGPTL3; (-) strand; PAM type: YTN; PAM sequence: TTC
  source 1..20: mol_type = other DNA
aaatggcatgccttagaaat

SEQ ID NO: 11355 - DNA, 20 bp, synthetic construct
  misc_feature 1..20: note = Description of Artificial Sequence: Synthetic oligonucleotide
  misc_feature 1..20: note = Target: ANGPTL3; (-) strand; PAM type: YTN; PAM sequence: TTT
  source 1..20: mol_type = other DNA
caaatggcatgccttagaaa

SEQ ID NO: 11356 - DNA, 20 bp, synthetic construct
  misc_feature 1..20: note = Description of Artificial Sequence: Synthetic oligonucleotide
  misc_feature 1..20: note = Target: ANGPTL3; (-) strand; PAM type: YTN; PAM sequence: TTC
  source 1..20: mol_type = other DNA
aacaatgcaacaaagtattt

SEQ ID NO: 11357 - DNA, 20 bp, synthetic construct
  misc_feature 1..20: note = Description of Artificial Sequence: Synthetic oligonucleotide
  misc_feature 1..20: note = Target: ANGPTL3; (-) strand; PAM type: YTN; PAM sequence: TTT
  source 1..20: mol_type = other DNA
caacaatgcaacaaagtatt

SEQ ID NO: 11358 - DNA, 20 bp, synthetic construct
  misc_feature 1..20: note = Description of Artificial Sequence: Synthetic oligonucleotide
  misc_feature 1..20: note = Target: ANGPTL3; (-) strand; PAM type: YTN; PAM sequence: TTG
  source 1..20: mol_type = other DNA
gaaaaaaaagtatttcaaca

SEQ ID NO: 11359 - DNA, 20 bp, synthetic construct
  misc_feature 1..20: note = Description of Artificial Sequence: Synthetic oligonucleotide
  misc_feature 1..20: note = Target: ANGPTL3; (-) strand; PAM type: YTN; PAM sequence: CTT
  source 1..20: mol_type = other DNA
ggaaaaaaaagtatttcaac

SEQ ID NO: 11360 - DNA, 20 bp, synthetic construct
  misc_feature 1..20: note = Description of Artificial Sequence: Synthetic oligonucleotide
  misc_feature 1..20: note = Target: ANGPTL3; (-) strand; PAM type: YTN; PAM sequence: TTC
  source 1..20: mol_type = other DNA
ttggaaaaaaaagtatttca

SEQ ID NO: 11361 - DNA, 20 bp, synthetic construct
  misc_feature 1..20: note = Description of Artificial Sequence: Synthetic oligonucleotide
  misc_feature 1..20: note = Target: ANGPTL3; (-) strand; PAM type: YTN; PAM sequence: TTT
  source 1..20: mol_type = other DNA
cttggaaaaaaaagtatttc

SEQ ID NO: 11362 - DNA, 20 bp, synthetic construct
  misc_feature 1..20: note = Description of Artificial Sequence: Synthetic oligonucleotide
  misc_feature 1..20: note = Target: ANGPTL3; (-) strand; PAM type: YTN; PAM sequence: TTT
  source 1..20: mol_type = other DNA
tcttggaaaaaaaagtattt

SEQ ID NO: 11363 - DNA, 20 bp, synthetic construct
  misc_feature 1..20: note = Description of Artificial Sequence: Synthetic oligonucleotide
  misc_feature 1..20: note = Target: ANGPTL3; (-) strand; PAM type: YTN; PAM sequence: TTT
  source 1..20: mol_type = other DNA
ttcttggaaaaaaaagtatt

SEQ ID NO: 11364 - DNA, 20 bp, synthetic construct
  misc_feature 1..20: note = Description of Artificial Sequence: Synthetic oligonucleotide
  misc_feature 1..20: note = Target: ANGPTL3; (-) strand; PAM type: YTN; PAM sequence: TTA
  source 1..20: mol_type = other DNA
tttttcttggaaaaaaaagt

SEQ ID NO: 11365 - DNA, 20 bp, synthetic construct
  misc_feature 1..20: note = Description of Artificial Sequence: Synthetic oligonucleotide
  misc_feature 1..20: note = Target: ANGPTL3; (-) strand; PAM type: YTN; PAM sequence: CTG
  source 1..20: mol_type = other DNA
gagattatttttcttggaaa

SEQ ID NO: 11366 - DNA, 20 bp, synthetic construct
  misc_feature 1..20: note = Description of Artificial Sequence: Synthetic oligonucleotide
  misc_feature 1..20: note = Target: ANGPTL3; (-) strand; PAM type: YTN; PAM sequence: TTC
  source 1..20: mol_type = other DNA
tggagattatttttcttgga

SEQ ID NO: 11367 - DNA, 20 bp, synthetic construct
  misc_feature 1..20: note = Description of Artificial Sequence: Synthetic oligonucleotide
  misc_feature 1..20: note = Target: ANGPTL3; (-) strand; PAM type: YTN; PAM sequence: TTT
  source 1..20: mol_type = other DNA
ctggagattatttttcttgg

SEQ ID NO: 11368 - DNA, 20 bp, synthetic construct
  misc_feature 1..20: note = Description of Artificial Sequence: Synthetic oligonucleotide
  misc_feature 1..20: note = Target: ANGPTL3; (-) strand; PAM type: YTN; PAM sequence: TTT
  source 1..20: mol_type = other DNA
tctggagattatttttcttg

SEQ ID NO: 11369 - DNA, 20 bp, synthetic construct
  misc_feature 1..20: note = Description of Artificial Sequence: Synthetic oligonucleotide
  misc_feature 1..20: note = Target: ANGPTL3; (-) strand; PAM type: YTN; PAM sequence: TTA
  source 1..20: mol_type = other DNA
ttttctggagattatttttc

SEQ ID NO: 11370 - DNA, 20 bp, synthetic construct
  misc_feature 1..20: note = Description of Artificial Sequence: Synthetic oligonucleotide
  misc_feature 1..20: note = Target: ANGPTL3; (-) strand; PAM type: YTN; PAM sequence: TTT
  source 1..20: mol_type = other DNA
attttctggagattattttt

SEQ ID NO: 11371 - DNA, 20 bp, synthetic construct
  misc_feature 1..20: note = Description of Artificial Sequence: Synthetic oligonucleotide
  misc_feature 1..20: note = Target: ANGPTL3; (-) strand; PAM type: YTN; PAM sequence: TTT
  source 1..20: mol_type = other DNA
tattttctggagattatttt

SEQ ID NO: 11372 - DNA, 20 bp, synthetic construct
  misc_feature 1..20: note = Description of Artificial Sequence: Synthetic oligonucleotide
  misc_feature 1..20: note = Target: ANGPTL3; (-) strand; PAM type: YTN; PAM sequence: TTA
  source 1..20: mol_type = other DNA
taataggaaattttattttc

SEQ ID NO: 11373 - DNA, 20 bp, synthetic construct
  misc_feature 1..20: note = Description of Artificial Sequence: Synthetic oligonucleotide
  misc_feature 1..20: note = Target: ANGPTL3; (-) strand; PAM type: YTN; PAM sequence: TTG
  source 1..20: mol_type = other DNA
aaattataataggaaatttt

SEQ ID NO: 11374 - DNA, 20 bp, synthetic construct
  misc_feature 1..20: note = Description of Artificial Sequence: Synthetic oligonucleotide
  misc_feature 1..20: note = Target: ANGPTL3; (-) strand; PAM type: YTN; PAM sequence: CTT
  source 1..20: mol_type = other DNA
gaaattataataggaaattt

SEQ ID NO: 11375 - DNA, 20 bp, synthetic construct
  misc_feature 1..20: note = Description of Artificial Sequence: Synthetic oligonucleotide
  misc_feature 1..20: note = Target: ANGPTL3; (-) strand; PAM type: YTN; PAM sequence: CTA
  source 1..20: mol_type = other DNA
acttgaaattataataggaa

SEQ ID NO: 11376 - DNA, 20 bp, synthetic construct
  misc_feature 1..20: note = Description of Artificial Sequence: Synthetic oligonucleotide
  misc_feature 1..20: note = Target: ANGPTL3; (-) strand; PAM type: YTN; PAM sequence: TTA
  source 1..20: mol_type = other DNA
gggaaacaaaaaactaactt

SEQ ID NO: 11377 - DNA, 20 bp, synthetic construct
  misc_feature 1..20: note = Description of Artificial Sequence: Synthetic oligonucleotide
  misc_feature 1..20: note = Target: ANGPTL3; (-) strand; PAM type: YTN; PAM sequence: TTC
  source 1..20: mol_type = other DNA
atatataacattagggaaac

SEQ ID NO: 11378 - DNA, 20 bp, synthetic construct
  misc_feature 1..20: note = Description of Artificial Sequence: Synthetic oligonucleotide
  misc_feature 1..20: note = Target: ANGPTL3; (-) strand; PAM type: YTN; PAM sequence: TTT
  source 1..20: mol_type = other DNA
catatataacattagggaaa

SEQ ID NO: 11379 - DNA, 20 bp, synthetic construct
  misc_feature 1..20: note = Description of Artificial Sequence: Synthetic oligonucleotide
  misc_feature 1..20: note = Target: ANGPTL3; (-) strand; PAM type: YTN; PAM sequence: TTT
  source 1..20: mol_type = other DNA
tcatatataacattagggaa

SEQ ID NO: 11380 - DNA, 20 bp, synthetic construct
  misc_feature 1..20: note = Description of Artificial Sequence: Synthetic oligonucleotide
  misc_feature 1..20: note = Target: ANGPTL3; (-) strand; PAM type: YTN; PAM sequence: TTC
  source 1..20: mol_type = other DNA
agtgttttcatatataacat

SEQ ID NO: 11381 - DNA, 20 bp, synthetic construct
  misc_feature 1..20: note = Description of Artificial Sequence: Synthetic oligonucleotide
  misc_feature 1..20: note = Target: ANGPTL3; (-) strand; PAM type: YTN; PAM sequence: TTT
  source 1..20: mol_type = other DNA
cagtgttttcatatataaca

SEQ ID NO: 11382 - DNA, 20 bp, synthetic construct
  misc_feature 1..20: note = Description of Artificial Sequence: Synthetic oligonucleotide
  misc_feature 1..20: note = Target: ANGPTL3; (-) strand; PAM type: YTN; PAM sequence: TTT
  source 1..20: mol_type = other DNA
tcagtgttttcatatataac

SEQ ID NO: 11383 - DNA, 20 bp, synthetic construct
  misc_feature 1..20: note = Description of Artificial Sequence: Synthetic oligonucleotide
  misc_feature 1..20: note = Target: ANGPTL3; (-) strand; PAM type: YTN; PAM sequence: TTC
  source 1..20: mol_type = other DNA
atataaaatgcaaattttca

SEQ ID NO: 11384 - DNA, 20 bp, synthetic construct
  misc_feature 1..20: note = Description of Artificial Sequence: Synthetic oligonucleotide
  misc_feature 1..20: note = Target: ANGPTL3; (-) strand; PAM type: YTN; PAM sequence: TTT
  source 1..20: mol_type = other DNA
catataaaatgcaaattttc

SEQ ID NO: 11385 - DNA, 20 bp, synthetic construct
  misc_feature 1..20: note = Description of Artificial Sequence: Synthetic oligonucleotide
  misc_feature 1..20: note = Target: ANGPTL3; (-) strand; PAM type: YTN; PAM sequence: TTT
  source 1..20: mol_type = other DNA
tcatataaaatgcaaatttt

SEQ ID NO: 11386 - DNA, 20 bp, synthetic construct
  misc_feature 1..20: note = Description of Artificial Sequence: Synthetic oligonucleotide
  misc_feature 1..20: note = Target: ANGPTL3; (-) strand; PAM type: YTN; PAM sequence: TTG
  source 1..20: mol_type = other DNA
taattttcatataaaatgca

SEQ ID NO: 11387 - DNA, 20 bp, synthetic construct
  misc_feature 1..20: note = Description of Artificial Sequence: Synthetic oligonucleotide
  misc_feature 1..20: note = Target: ANGPTL3; (-) strand; PAM type: YTN; PAM sequence: TTT
  source 1..20: mol_type = other DNA
gtaattttcatataaaatgc

SEQ ID NO: 11388 - DNA, 20 bp, synthetic construct
  misc_feature 1..20: note = Description of Artificial Sequence: Synthetic oligonucleotide
  misc_feature 1..20: note = Target: ANGPTL3; (-) strand; PAM type: YTN; PAM sequence: TTA
  source 1..20: mol_type = other DNA
accgatttgtaattttcata

SEQ ID NO: 11389 - DNA, 20 bp, synthetic construct
  misc_feature 1..20: note = Description of Artificial Sequence: Synthetic oligonucleotide
  misc_feature 1..20: note = Target: ANGPTL3; (-) strand; PAM type: YTN; PAM sequence: TTT
  source 1..20: mol_type = other DNA
aaccgatttgtaattttcat

SEQ ID NO: 11390 - DNA, 20 bp, synthetic construct
  misc_feature 1..20: note = Description of Artificial Sequence: Synthetic oligonucleotide
  misc_feature 1..20: note = Target: ANGPTL3; (-) strand; PAM type: YTN; PAM sequence: TTG
  source 1..20: mol_type = other DNA
tataatttaaccgatttgta

SEQ ID NO: 11391 - DNA, 20 bp, synthetic construct
  misc_feature 1..20: note = Description of Artificial Sequence: Synthetic oligonucleotide
  misc_feature 1..20: note = Target: ANGPTL3; (-) strand; PAM type: YTN; PAM sequence: CTA
  source 1..20: mol_type = other DNA
gattgtataatttaaccgat

SEQ ID NO: 11392 - DNA, 20 bp, synthetic construct
  misc_feature 1..20: note = Description of Artificial Sequence: Synthetic oligonucleotide
  misc_feature 1..20: note = Target: ANGPTL3; (-) strand; PAM type: YTN; PAM sequence: TTC
  source 1..20: mol_type = other DNA
tagattgtataatttaaccg

SEQ ID NO: 11393 - DNA, 20 bp, synthetic construct
  misc_feature 1..20: note = Description of Artificial Sequence: Synthetic oligonucleotide
  misc_feature 1..20: note = Target: ANGPTL3; (-) strand; PAM type: YTN; PAM sequence: TTA
  source 1..20: mol_type = other DNA
caatagtgtaatgacatagt

SEQ ID NO: 11394 - DNA, 20 bp, synthetic construct
  misc_feature 1..20: note = Description of Artificial Sequence: Synthetic oligonucleotide
  misc_feature 1..20: note = Target: ANGPTL3; (-) strand; PAM type: YTN; PAM sequence: TTT
  source 1..20: mol_type = other DNA
acaatagtgtaatgacatag

SEQ ID NO: 11395 - DNA, 20 bp, synthetic construct
  misc_feature 1..20: note = Description of Artificial Sequence: Synthetic oligonucleotide
  misc_feature 1..20: note = Target: ANGPTL3; (-) strand; PAM type: YTN; PAM sequence: TTC
  source 1..20: mol_type = other DNA
agtaatttacaatagtgtaa

SEQ ID NO: 11396 - DNA, 20 bp, synthetic construct
  misc_feature 1..20: note = Description of Artificial Sequence: Synthetic oligonucleotide
  misc_feature 1..20: note = Target: ANGPTL3; (-) strand; PAM type: YTN; PAM sequence: CTT
  source 1..20: mol_type = other DNA
cagtaatttacaatagtgta

SEQ ID NO: 11397 - DNA, 20 bp, synthetic construct
  misc_feature 1..20: note = Description of Artificial Sequence: Synthetic oligonucleotide
  misc_feature 1..20: note = Target: ANGPTL3; (-) strand; PAM type: YTN; PAM sequence: TTA
  source 1..20: mol_type = other DNA
ccttcagtaatttacaatag

SEQ ID NO: 11398 - DNA, 20 bp, synthetic construct
  misc_feature 1..20: note = Description of Artificial Sequence: Synthetic oligonucleotide
  misc_feature 1..20: note = Target: ANGPTL3; (-) strand; PAM type: YTN; PAM sequence: CTT
  source 1..20: mol_type = other DNA
accttcagtaatttacaata

SEQ ID NO: 11399 - DNA, 20 bp, synthetic construct
  misc_feature 1..20: note = Description of Artificial Sequence: Synthetic oligonucleotide
  misc_feature 1..20: note = Target: ANGPTL3; (-) strand; PAM type: YTN; PAM sequence: TTA
  source 1..20: mol_type = other DNA
cttaccttcagtaatttaca

SEQ ID NO: 11400 - DNA, 20 bp, synthetic construct
  misc_feature 1..20: note = Description of Artificial Sequence: Synthetic oligonucleotide
  misc_feature 1..20: note = Target: ANGPTL3; (-) strand; PAM type: YTN; PAM sequence: TTT
  source 1..20: mol_type = other DNA
acttaccttcagtaatttac

SEQ ID NO: 11401 - DNA, 20 bp, synthetic construct
  misc_feature 1..20: note = Description of Artificial Sequence: Synthetic oligonucleotide
  misc_feature 1..20: note = Target: ANGPTL3; (-) strand; PAM type: YTN; PAM sequence: TTT
  source 1..20: mol_type = other DNA
tacttaccttcagtaattta

SEQ ID NO: 11402 - DNA, 20 bp, synthetic construct
  misc_feature 1..20: note = Description of Artificial Sequence: Synthetic oligonucleotide
  misc_feature 1..20: note = Target: ANGPTL3; (-) strand; PAM type: YTN; PAM sequence: TTT
  source 1..20: mol_type = other DNA
ttacttaccttcagtaattt

SEQ ID NO: 11403 - DNA, 20 bp, synthetic construct
  misc_feature 1..20: note = Description of Artificial Sequence: Synthetic oligonucleotide
  misc_feature 1..20: note = Target: ANGPTL3; (-) strand; PAM type: YTN; PAM sequence: CTT
  source 1..20: mol_type = other DNA
tttacttaccttcagtaatt

SEQ ID NO: 11404 - DNA, 20 bp, synthetic construct
  misc_feature 1..20: note = Description of Artificial Sequence: Synthetic oligonucleotide
  misc_feature 1..20: note = Target: ANGPTL3; (-) strand; PAM type: YTN; PAM sequence: TTA
  source 1..20: mol_type = other DNA
actttttacttaccttcagt

SEQ ID NO: 11405 - DNA, 20 bp, synthetic construct
  misc_feature 1..20: note = Description of Artificial Sequence: Synthetic oligonucleotide
  misc_feature 1..20: note = Target: ANGPTL3; (-) strand; PAM type: YTN; PAM sequence: TTT
  source 1..20: mol_type = other DNA
aactttttacttaccttcag

SEQ ID NO: 11406 - DNA, 20 bp, synthetic construct
  misc_feature 1..20: note = Description of Artificial Sequence: Synthetic oligonucleotide
  misc_feature 1..20: note = Target: ANGPTL3; (-) strand; PAM type: YTN; PAM sequence: TTT
  source 1..20: mol_type = other DNA
taactttttacttaccttca

SEQ ID NO: 11407 - DNA, 20 bp, synthetic construct
  misc_feature 1..20: note = Description of Artificial Sequence: Synthetic oligonucleotide
  misc_feature 1..20: note = Target: ANGPTL3; (-) strand; PAM type: YTN; PAM sequence: TTT
  source 1..20: mol_type = other DNA
ttaactttttacttaccttc

SEQ ID NO: 11408 - DNA, 20 bp, synthetic construct
  misc_feature 1..20: note = Description of Artificial Sequence: Synthetic oligonucleotide
  misc_feature 1..20: note = Target: ANGPTL3; (-) strand; PAM type: YTN; PAM sequence: TTT
  source 1..20: mol_type = other DNA
tttaactttttacttacctt

SEQ ID NO: 11409 - DNA, 20 bp, synthetic construct
  misc_feature 1..20: note = Description of Artificial Sequence: Synthetic oligonucleotide
  misc_feature 1..20: note = Target: ANGPTL3; (-) strand; PAM type: YTN; PAM sequence: TTT
  source 1..20: mol_type = other DNA
ttttaactttttacttacct

SEQ ID NO: 11410 - DNA, 20 bp, synthetic construct
  misc_feature 1..20: note = Description of Artificial Sequence: Synthetic oligonucleotide
  misc_feature 1..20: note = Target: ANGPTL3; (-) strand; PAM type: YTN; PAM sequence: TTT
  source 1..20: mol_type = other DNA
tttttaactttttacttacc

SEQ ID NO: 11411 - DNA, 20 bp, synthetic construct
  misc_feature 1..20: note = Description of Artificial Sequence: Synthetic oligonucleotide
  misc_feature 1..20: note = Target: ANGPTL3; (-) strand; PAM type: YTN; PAM sequence: TTA
  source 1..20: mol_type = other DNA
aattttttttaactttttac

SEQ ID NO: 11412 - DNA, 20 bp, synthetic construct
  misc_feature 1..20: note = Description of Artificial Sequence: Synthetic oligonucleotide
  misc_feature 1..20: note = Target: ANGPTL3; (-) strand; PAM type: YTN; PAM sequence: TTT
  source 1..20: mol_type = other DNA
aaattttttttaacttttta

SEQ ID NO: 11413 - DNA, 20 bp, synthetic construct
  misc_feature 1..20: note = Description of Artificial Sequence: Synthetic oligonucleotide
  misc_feature 1..20: note = Target: ANGPTL3; (-) strand; PAM type: YTN; PAM sequence: TTT
  source 1..20: mol_type = other DNA
taaattttttttaacttttt

SEQ ID NO: 11414 - DNA, 20 bp, synthetic construct
  misc_feature 1..20: note = Description of Artificial Sequence: Synthetic oligonucleotide
  misc_feature 1..20: note = Target: ANGPTL3; (-) strand; PAM type: YTN; PAM sequence: CTG
  source 1..20: mol_type = other DNA
gagaatagttttaaattttt

SEQ ID NO: 11415 - DNA, 20 bp, synthetic construct
  misc_feature 1..20: note = Description of Artificial Sequence: Synthetic oligonucleotide
  misc_feature 1..20: note = Target: ANGPTL3; (-) strand; PAM type: YTN; PAM sequence: TTA
  source 1..20: mol_type = other DNA
aacactggagaatagtttta

SEQ ID NO: 11416 - DNA, 20 bp, synthetic construct
  misc_feature 1..20: note = Description of Artificial Sequence: Synthetic oligonucleotide
  misc_feature 1..20: note = Target: ANGPTL3; (-) strand; PAM type: YTN; PAM sequence: TTT
  source 1..20: mol_type = other DNA
aaacactggagaatagtttt

SEQ ID NO: 11417 - DNA, 20 bp, synthetic construct
  misc_feature 1..20: note = Description of Artificial Sequence: Synthetic oligonucleotide
  misc_feature 1..20: note = Target: ANGPTL3; (-) strand; PAM type: YTN; PAM sequence: TTT
  source 1..20: mol_type = other DNA
taaacactggagaatagttt

SEQ ID NO: 11418 - DNA, 20 bp, synthetic construct
  misc_feature 1..20: note = Description of Artificial Sequence: Synthetic oligonucleotide
  misc_feature 1..20: note = Target: ANGPTL3; (-) strand; PAM type: YTN; PAM sequence: CTG
  source 1..20: mol_type = other DNA
ttttaaacactggagaatag

SEQ ID NO: 11419 - DNA, 20 bp, synthetic construct
  misc_feature 1..20: note = Description of Artificial Sequence: Synthetic oligonucleotide
  misc_feature 1..20: note = Target: ANGPTL3; (-) strand; PAM type: YTN; PAM sequence: TTA
  source 1..20: mol_type = other DNA
atctgttttaaacactggag

SEQ ID NO: 11420 - DNA, 20 bp, synthetic construct
  misc_feature 1..20: note = Description of Artificial Sequence: Synthetic oligonucleotide
  misc_feature 1..20: note = Target: ANGPTL3; (-) strand; PAM type: YTN; PAM sequence: TTT
  source 1..20: mol_type = other DNA
aatctgttttaaacactgga

SEQ ID NO: 11421 - DNA, 20 bp, synthetic construct
  misc_feature 1..20: note = Description of Artificial Sequence: Synthetic oligonucleotide
  misc_feature 1..20: note = Target: ANGPTL3; (-) strand; PAM type: YTN; PAM sequence: TTA
  source 1..20: mol_type = other DNA
tttaatctgttttaaacact

SEQ ID NO: 11422 - DNA, 20 bp, synthetic construct
  misc_feature 1..20: note = Description of Artificial Sequence: Synthetic oligonucleotide
  misc_feature 1..20: note = Target: ANGPTL3; (-) strand; PAM type: YTN; PAM sequence: CTG
  source 1..20: mol_type = other DNA
tattatttaatctgttttaa

SEQ ID NO: 11423 - DNA, 20 bp, synthetic construct
  misc_feature 1..20: note = Description of Artificial Sequence: Synthetic oligonucleotide
  misc_feature 1..20: note = Target: ANGPTL3; (-) strand; PAM type: YTN; PAM sequence: TTA
  source 1..20: mol_type = other DNA
ctgtattatttaatctgttt

SEQ ID NO: 11424 - DNA, 20 bp, synthetic construct
  misc_feature 1..20: note = Description of Artificial Sequence: Synthetic oligonucleotide
  misc_feature 1..20: note = Target: ANGPTL3; (-) strand; PAM type: YTN; PAM sequence: TTT
  source 1..20: mol_type = other DNA
actgtattatttaatctgtt

SEQ ID NO: 11425 - DNA, 20 bp, synthetic construct
  misc_feature 1..20: note = Description of Artificial Sequence: Synthetic oligonucleotide
  misc_feature 1..20: note = Target: ANGPTL3; (-) strand; PAM type: YTN; PAM sequence: TTC
  source 1..20: mol_type = other DNA
catttactgtattatttaat

SEQ ID NO: 11426 - DNA, 20 bp, synthetic construct
  misc_feature 1..20: note = Description of Artificial Sequence: Synthetic oligonucleotide
  misc_feature 1..20: note = Target: ANGPTL3; (-) strand; PAM type: YTN; PAM sequence: TTT
  source 1..20: mol_type = other DNA
ccatttactgtattatttaa

SEQ ID NO: 11427 - DNA, 20 bp, synthetic construct
  misc_feature 1..20: note = Description of Artificial Sequence: Synthetic oligonucleotide
  misc_feature 1..20: note = Target: ANGPTL3; (-) strand; PAM type: YTN; PAM sequence: TTT
  source 1..20: mol_type = other DNA
tccatttactgtattattta

SEQ ID NO: 11428 - DNA, 20 bp, synthetic construct
  misc_feature 1..20: note = Description of Artificial Sequence: Synthetic oligonucleotide
  misc_feature 1..20: note = Target: ANGPTL3; (-) strand; PAM type: YTN; PAM sequence: CTT
  source 1..20: mol_type = other DNA
ttccatttactgtattattt

SEQ ID NO: 11429 - DNA, 20 bp, synthetic construct
  misc_feature 1..20: note = Description of Artificial Sequence: Synthetic oligonucleotide
  misc_feature 1..20: note = Target: ANGPTL3; (-) strand; PAM type: YTN; PAM sequence: TTC
  source 1..20: mol_type = other DNA
atatgaataaatcttttcca

SEQ ID NO: 11430 - DNA, 20 bp, synthetic construct
  misc_feature 1..20: note = Description of Artificial Sequence: Synthetic oligonucleotide
  misc_feature 1..20: note = Target: ANGPTL3; (-) strand; PAM type: YTN; PAM sequence: TTT
  source 1..20: mol_type = other DNA
catatgaataaatcttttcc

SEQ ID NO: 11431 - DNA, 20 bp, synthetic construct
  misc_feature 1..20: note = Description of Artificial Sequence: Synthetic oligonucleotide
  misc_feature 1..20: note = Target: ANGPTL3; (-) strand; PAM type: YTN; PAM sequence: TTT
  source 1..20: mol_type = other DNA
tcatatgaataaatcttttc

SEQ ID NO: 11432 - DNA, 20 bp, synthetic construct
  misc_feature 1..20: note = Description of Artificial Sequence: Synthetic oligonucleotide
  misc_feature 1..20: note = Target: ANGPTL3; (-) strand; PAM type: YTN; PAM sequence: TTA
  source 1..20: mol_type = other DNA
aaagaaaaagcccagcatat

SEQ ID NO: 11433 - DNA, 20 bp, synthetic construct
  misc_feature 1..20: note = Description of Artificial Sequence: Synthetic oligonucleotide
  misc_feature 1..20: note = Target: ANGPTL3; (-) strand; PAM type: YTN; PAM sequence: TTC
  source 1..20: mol_type = other DNA
aattaaaagaaaaagcccag

SEQ ID NO: 11434 - DNA, 20 bp, synthetic construct
  misc_feature 1..20: note = Description of Artificial Sequence: Synthetic oligonucleotide
  misc_feature 1..20: note = Target: ANGPTL3; (-) strand; PAM type: YTN; PAM sequence: CTT
  source 1..20: mol_type = other DNA
caattaaaagaaaaagccca

SEQ ID NO: 11435 - DNA, 20 bp, synthetic construct
  misc_feature 1..20: note = Description of Artificial Sequence: Synthetic oligonucleotide
  misc_feature 1..20: note = Target: ANGPTL3; (-) strand; PAM type: YTN; PAM sequence: CTG
  source 1..20: mol_type = other DNA
aacttcaattaaaagaaaaa

SEQ ID NO: 11436 - DNA, 20 bp, synthetic construct
  misc_feature 1..20: note = Description of Artificial Sequence: Synthetic oligonucleotide
  misc_feature 1..20: note = Target: ANGPTL3; (-) strand; PAM type: YTN; PAM sequence: TTC
  source 1..20: mol_type = other DNA
tgaacttcaattaaaagaaa

SEQ ID NO: 11437 - DNA, 20 bp, synthetic construct
  misc_feature 1..20: note = Description of Artificial Sequence: Synthetic oligonucleotide
  misc_feature 1..20: note = Target: ANGPTL3; (-) strand; PAM type: YTN; PAM sequence: TTT
  source 1..20: mol_type = other DNA
ctgaacttcaattaaaagaa

SEQ ID NO: 11438 - DNA, 20 bp, synthetic construct
  misc_feature 1..20: note = Description of Artificial Sequence: Synthetic oligonucleotide
  misc_feature 1..20: note = Target: ANGPTL3; (-) strand; PAM type: YTN; PAM sequence: TTT
  source 1..20: mol_type = other DNA
tctgaacttcaattaaaaga

SEQ ID NO: 11439 - DNA, 20 bp, synthetic construct
  misc_feature 1..20: note = Description of Artificial Sequence: Synthetic oligonucleotide
  misc_feature 1..20: note = Target: ANGPTL3; (-) strand; PAM type: YTN; PAM sequence: TTG
  source 1..20: mol_type = other DNA
attttctgaacttcaattaa

SEQ ID NO: 11440 - DNA, 20 bp, synthetic construct
  misc_feature 1..20: note = Description of Artificial Sequence: Synthetic oligonucleotide
  misc_feature 1..20: note = Target: ANGPTL3; (-) strand; PAM type: YTN; PAM sequence: TTT
  source 1..20: mol_type = other DNA
gattttctgaacttcaatta

SEQ ID NO: 11441 - DNA, 20 bp, synthetic construct
  misc_feature 1..20: note = Description of Artificial Sequence: Synthetic oligonucleotide
  misc_feature 1..20: note = Target: ANGPTL3; (-) strand; PAM type: YTN; PAM sequence: CTA
  source 1..20: mol_type = other DNA
aaatttgattttctgaactt

SEQ ID NO: 11442 - DNA, 20 bp, synthetic construct
  misc_feature 1..20: note = Description of Artificial Sequence: Synthetic oligonucleotide
  misc_feature 1..20: note = Target: ANGPTL3; (-) strand; PAM type: YTN; PAM sequence: CTC
  source 1..20: mol_type = other DNA
taaaatttgattttctgaac

SEQ ID NO: 11443 - DNA, 20 bp, synthetic construct
  misc_feature 1..20: note = Description of Artificial Sequence: Synthetic oligonucleotide
  misc_feature 1..20: note = Target: ANGPTL3; (-) strand; PAM type: YTN; PAM sequence: CTA
  source 1..20: mol_type = other DNA
tctctaaaatttgattttct

SEQ ID NO: 11444 - DNA, 20 bp, synthetic construct
  misc_feature 1..20: note = Description of Artificial Sequence: Synthetic oligonucleotide
  misc_feature 1..20: note = Target: ANGPTL3; (-) strand; PAM type: YTN; PAM sequence: TTG
  source 1..20: mol_type = other DNA
tactatctctaaaatttgat

SEQ ID NO: 11445 - DNA, 20 bp, synthetic construct
  misc_feature 1..20: note = Description of Artificial Sequence: Synthetic oligonucleotide
  misc_feature 1..20: note = Target: ANGPTL3; (-) strand; PAM type: YTN; PAM sequence: TTA
  source 1..20: mol_type = other DNA
aattgtactatctctaaaat

SEQ ID NO: 11446 - DNA, 20 bp, synthetic construct
  misc_feature 1..20: note = Description of Artificial Sequence: Synthetic oligonucleotide
  misc_feature 1..20: note = Target: ANGPTL3; (-) strand; PAM type: YTN; PAM sequence: TTT
  source 1..20: mol_type = other DNA
aaattgtactatctctaaaa

SEQ ID NO: 11447 - DNA, 20 bp, synthetic construct
  misc_feature 1..20: note = Description of Artificial Sequence: Synthetic oligonucleotide
  misc_feature 1..20: note = Target: ANGPTL3; (-) strand; PAM type: YTN; PAM sequence: TTA
  source 1..20: mol_type = other DNA
tttaaattgtactatctcta

SEQ ID NO: 11448 - DNA, 20 bp, synthetic construct
  misc_feature 1..20: note = Description of Artificial Sequence: Synthetic oligonucleotide
  misc_feature 1..20: note = Target: ANGPTL3; (-) strand; PAM type: YTN; PAM sequence: TTT
  source 1..20: mol_type = other DNA
atttaaattgtactatctct

SEQ ID NO: 11449 - DNA, 20 bp, synthetic construct
  misc_feature 1..20: note = Description of Artificial Sequence: Synthetic oligonucleotide
  misc_feature 1..20: note = Target: ANGPTL3; (-) strand; PAM type: YTN; PAM sequence: TTT
  source 1..20: mol_type = other DNA
tatttaaattgtactatctc

SEQ ID NO: 11450 - DNA, 20 bp, synthetic construct
  misc_feature 1..20: note = Description of Artificial Sequence: Synthetic oligonucleotide
  misc_feature 1..20: note = Target: ANGPTL3; (-) strand; PAM type: YTN; PAM sequence: TTA
  source 1..20: mol_type = other DNA
acattttatttaaattgtac

SEQ ID NO: 11451 - DNA, 20 bp, synthetic construct
  misc_feature 1..20: note = Description of Artificial Sequence: Synthetic oligonucleotide
  misc_feature 1..20: note = Target: ANGPTL3; (-) strand; PAM type: YTN; PAM sequence: CTT
  source 1..20: mol_type = other DNA
aacattttatttaaattgta

SEQ ID NO: 11452 - DNA, 20 bp, synthetic construct
  misc_feature 1..20: note = Description of Artificial Sequence: Synthetic oligonucleotide
  misc_feature 1..20: note = Target: ANGPTL3; (-) strand; PAM type: YTN; PAM sequence: TTG
  source 1..20: mol_type = other DNA
tccttaacattttatttaaa

SEQ ID NO: 11453 - DNA, 20 bp, synthetic construct
  misc_feature 1..20: note = Description of Artificial Sequence: Synthetic oligonucleotide
  misc_feature 1..20: note = Target: ANGPTL3; (-) strand; PAM type: YTN; PAM sequence: TTT
  source 1..20: mol_type = other DNA
gtccttaacattttatttaa

SEQ ID NO: 11454 - DNA, 20 bp, synthetic construct
  misc_feature 1..20: note = Description of Artificial Sequence: Synthetic oligonucleotide
  misc_feature 1..20: note = Target: ANGPTL3; (-) strand; PAM type: YTN; PAM sequence: TTT
  source 1..20: mol_type = other DNA
tgtccttaacattttattta

SEQ ID NO: 11455 - DNA, 20 bp, synthetic construct
  misc_feature 1..20: note = Description of Artificial Sequence: Synthetic oligonucleotide
  misc_feature 1..20: note = Target: ANGPTL3; (-) strand; PAM type: YTN; PAM sequence: TTT
  source 1..20: mol_type = other DNA
ttgtccttaacattttattt

SEQ ID NO: 11456 - DNA, 20 bp, synthetic construct
  misc_feature 1..20: note = Description of Artificial Sequence: Synthetic oligonucleotide
  misc_feature 1..20: note = Target: ANGPTL3; (-) strand; PAM type: YTN; PAM sequence: TTC
  source 1..20: mol_type = other DNA
aaatagcacatatttttgtc

SEQ ID NO: 11457 - DNA, 20 bp, synthetic construct
  misc_feature 1..20: note = Description of Artificial Sequence: Synthetic oligonucleotide
  misc_feature 1..20: note = Target: ANGPTL3; (-) strand; PAM type: YTN; PAM sequence: TTT
  source 1..20: mol_type = other DNA
caaatagcacatatttttgt

SEQ ID NO: 11458 - DNA, 20 bp, synthetic construct
  misc_feature 1..20: note = Description of Artificial Sequence: Synthetic oligonucleotide
  misc_feature 1..20: note = Target: ANGPTL3; (-) strand; PAM type: YTN; PAM sequence: CTT
  source 1..20: mol_type = other DNA
tcaaatagcacatatttttg

SEQ ID NO: 11459 - DNA, 20 bp, synthetic construct
  misc_feature 1..20: note = Description of Artificial Sequence: Synthetic oligonucleotide
  misc_feature 1..20: note = Target: ANGPTL3; (-) strand; PAM type: YTN; PAM sequence: TTC
  source 1..20: mol_type = other DNA
tttcaaatagcacatatttt

SEQ ID NO: 11460 - DNA, 20 bp, synthetic construct
  misc_feature 1..20: note = Description of Artificial Sequence: Synthetic oligonucleotide
  misc_feature 1..20: note = Target: ANGPTL3; (-) strand; PAM type: YTN; PAM sequence: CTT
  source 1..20: mol_type = other DNA
ctttcaaatagcacatattt

SEQ ID NO: 11461 - DNA, 20 bp, synthetic construct
  misc_feature 1..20: note = Description of Artificial Sequence: Synthetic oligonucleotide
  misc_feature 1..20: note = Target: ANGPTL3; (-) strand; PAM type: YTN; PAM sequence: TTG
  source 1..20: mol_type = other DNA
tatgcttctttcaaatagca

SEQ ID NO: 11462 - DNA, 20 bp, synthetic construct
  misc_feature 1..20: note = Description of Artificial Sequence: Synthetic oligonucleotide
  misc_feature 1..20: note = Target: ANGPTL3; (-) strand; PAM type: YTN; PAM sequence: CTT
  source 1..20: mol_type = other DNA
gtatgcttctttcaaatagc

SEQ ID NO: 11463 - DNA, 20 bp, synthetic construct
  misc_feature 1..20: note = Description of Artificial Sequence: Synthetic oligonucleotide
  misc_feature 1..20: note = Target: ANGPTL3; (-) strand; PAM type: YTN; PAM sequence: TTC
  source 1..20: mol_type = other DNA
cccttgtatgcttctttcaa

SEQ ID NO: 11464 - DNA, 20 bp, synthetic construct
  misc_feature 1..20: note = Description of Artificial Sequence: Synthetic oligonucleotide
  misc_feature 1..20: note = Target: ANGPTL3; (-) strand; PAM type: YTN; PAM sequence: CTT
  source 1..20: mol_type = other DNA
ccccttgtatgcttctttca

SEQ ID NO: 11465 - DNA, 20 bp, synthetic construct
  misc_feature 1..20: note = Description of Artificial Sequence: Synthetic oligonucleotide
  misc_feature 1..20: note = Target: ANGPTL3; (-) strand; PAM type: YTN; PAM sequence: TTC
  source 1..20: mol_type = other DNA
cttccccttgtatgcttctt

SEQ ID NO: 11466 - DNA, 20 bp, synthetic construct
  misc_feature 1..20: note = Description of Artificial Sequence: Synthetic oligonucleotide
  misc_feature 1..20: note = Target: ANGPTL3; (-) strand; PAM type: YTN; PAM sequence: TTG
  source 1..20: mol_type = other DNA
gcaattccttccccttgtat

SEQ ID NO: 11467 - DNA, 20 bp, synthetic construct
  misc_feature 1..20: note = Description of Artificial Sequence: Synthetic oligonucleotide
  misc_feature 1..20: note = Target: ANGPTL3; (-) strand; PAM type: YTN; PAM sequence: TTG
  source 1..20: mol_type = other DNA
aaaaatgaatattggcaatt

SEQ ID NO: 11468 - DNA, 20 bp, synthetic construct
  misc_feature 1..20: note = Description of Artificial Sequence: Synthetic oligonucleotide
  misc_feature 1..20: note = Target: ANGPTL3; (-) strand; PAM type: YTN; PAM sequence: TTT
  source 1..20: mol_type = other DNA
gaaaaatgaatattggcaat

SEQ ID NO: 11469 - DNA, 20 bp, synthetic construct
  misc_feature 1..20: note = Description of Artificial Sequence: Synthetic oligonucleotide
  misc_feature 1..20: note = Target: ANGPTL3; (-) strand; PAM type: YTN; PAM sequence: CTA
  source 1..20: mol_type = other DNA
ataatggatttgaaaaatga

SEQ ID NO: 11470 - DNA, 20 bp, synthetic construct
  misc_feature 1..20: note = Description of Artificial Sequence: Synthetic oligonucleotide
  misc_feature 1..20: note = Target: ANGPTL3; (-) strand; PAM type: YTN; PAM sequence: TTA
  source 1..20: mol_type = other DNA
aactaataatggatttgaaa

SEQ ID NO: 11471 - DNA, 20 bp, synthetic construct
  misc_feature 1..20: note = Description of Artificial Sequence: Synthetic oligonucleotide
  misc_feature 1..20: note = Target: ANGPTL3; (-) strand; PAM type: YTN; PAM sequence: TTT
  source 1..20: mol_type = other DNA
aaactaataatggatttgaa

SEQ ID NO: 11472 - DNA, 20 bp, synthetic construct
  misc_feature 1..20: note = Description of Artificial Sequence: Synthetic oligonucleotide
  misc_feature 1..20: note = Target: ANGPTL3; (-) strand; PAM type: YTN; PAM sequence: TTT
  source 1..20: mol_type = other DNA
taaactaataatggatttga

SEQ ID NO: 11473 - DNA, 20 bp, synthetic construct
  misc_feature 1..20: note = Description of Artificial Sequence: Synthetic oligonucleotide
  misc_feature 1..20: note = Target: ANGPTL3; (-) strand; PAM type: YTN; PAM sequence: TTT
  source 1..20: mol_type = other DNA
ttaaactaataatggatttg

SEQ ID NO: 11474 - DNA, 20 bp, synthetic construct
  misc_feature 1..20: note = Description of Artificial Sequence: Synthetic oligonucleotide
  misc_feature 1..20: note = Target: ANGPTL3; (-) strand; PAM type: YTN; PAM sequence: CTA
  source 1..20: mol_type = other DNA
aatttttaaactaataatgg

SEQ ID NO: 11475 - DNA, 20 bp, synthetic construct
  misc_feature 1..20: note = Description of Artificial Sequence: Synthetic oligonucleotide
  misc_feature 1..20: note = Target: ANGPTL3; (-) strand; PAM type: YTN; PAM sequence: CTA
  source 1..20: mol_type = other DNA
tcataatctaaatttttaaa

SEQ ID NO: 11476 - DNA, 20 bp, synthetic construct
  misc_feature 1..20: note = Description of Artificial Sequence: Synthetic oligonucleotide
  misc_feature 1..20: note = Target: ANGPTL3; (-) strand; PAM type: YTN; PAM sequence: CTG
  source 1..20: mol_type = other DNA
taacactatcataatctaaa

SEQ ID NO: 11477 - DNA, 20 bp, synthetic construct
  misc_feature 1..20: note = Description of Artificial Sequence: Synthetic oligonucleotide
  misc_feature 1..20: note = Target: ANGPTL3; (-) strand; PAM type: YTN; PAM sequence: TTC
  source 1..20: mol_type = other DNA
ctgtaacactatcataatct

SEQ ID NO: 11478 - DNA, 20 bp, synthetic construct
  misc_feature 1..20: note = Description of Artificial Sequence: Synthetic oligonucleotide
  misc_feature 1..20: note = Target: ANGPTL3; (-) strand; PAM type: YTN; PAM sequence: TTT
  source 1..20: mol_type = other DNA
cctgtaacactatcataatc

SEQ ID NO: 11479 - DNA, 20 bp, synthetic construct
  misc_feature 1..20: note = Description of Artificial Sequence: Synthetic oligonucleotide
  misc_feature 1..20: note = Target: ANGPTL3; (-) strand; PAM type: YTN; PAM sequence: TTA
  source 1..20: mol_type = other DNA
atttcctgtaacactatcat

SEQ ID NO: 11480 - DNA, 20 bp, synthetic construct
  misc_feature 1..20: note = Description of Artificial Sequence: Synthetic oligonucleotide
  misc_feature 1..20: note = Target: ANGPTL3; (-) strand; PAM type: YTN; PAM sequence: CTA
  source 1..20: mol_type = other DNA
ttaatttcctgtaacactat

SEQ ID NO: 11481 - DNA, 20 bp, synthetic construct
  misc_feature 1..20: note = Description of Artificial Sequence: Synthetic oligonucleotide
  misc_feature 1..20: note = Target: ANGPTL3; (-) strand; PAM type: YTN; PAM sequence: TTC
  source 1..20: mol_type = other DNA
tattaatttcctgtaacact

SEQ ID NO: 11482 - DNA, 20 bp, synthetic construct
  misc_feature 1..20: note = Description of Artificial Sequence: Synthetic oligonucleotide
  misc_feature 1..20: note = Target: ANGPTL3; (-) strand; PAM type: YTN; PAM sequence: TTT
  source 1..20: mol_type = other DNA
ctattaatttcctgtaacac

SEQ ID NO: 11483 - DNA, 20 bp, synthetic construct
  misc_feature 1..20: note = Description of Artificial Sequence: Synthetic oligonucleotide
  misc_feature 1..20: note = Target: ANGPTL3; (-) strand; PAM type: YTN; PAM sequence: TTT
  source 1..20: mol_type = other DNA
tctattaatttcctgtaaca

SEQ ID NO: 11484 - DNA, 20 bp, synthetic construct
  misc_feature 1..20: note = Description of Artificial Sequence: Synthetic oligonucleotide
  misc_feature 1..20: note = Target: ANGPTL3; (-) strand; PAM type: YTN; PAM sequence: CTT
  source 1..20: mol_type = other DNA
ttctattaatttcctgtaac

SEQ ID NO: 11485 - DNA, 20 bp, synthetic construct
  misc_feature 1..20: note = Description of Artificial Sequence: Synthetic oligonucleotide
  misc_feature 1..20: note = Target: ANGPTL3; (-) strand; PAM type: YTN; PAM sequence: TTC
  source 1..20: mol_type = other DNA
ttttctattaatttcctgta

SEQ ID NO: 11486 - DNA, 20 bp, synthetic construct
  misc_feature 1..20: note = Description of Artificial Sequence: Synthetic oligonucleotide
  misc_feature 1..20: note = Target: ANGPTL3; (-) strand; PAM type: YTN; PAM sequence: TTT
  source 1..20: mol_type = other DNA
cttttctattaatttcctgt

SEQ ID NO: 11487 - DNA, 20 bp, synthetic construct
  misc_feature 1..20: note = Description of Artificial Sequence: Synthetic oligonucleotide
  misc_feature 1..20: note = Target: ANGPTL3; (-) strand; PAM type: YTN; PAM sequence: CTT
  source 1..20: mol_type = other DNA
tcttttctattaatttcctg

SEQ ID NO: 11488 - DNA, 20 bp, synthetic construct
  misc_feature 1..20: note = Description of Artificial Sequence: Synthetic oligonucleotide
  misc_feature 1..20: note = Target: ANGPTL3; (-) strand; PAM type: YTN; PAM sequence: CTC
  source 1..20: mol_type = other DNA
tttcttttctattaatttcc

SEQ ID NO: 11489 - DNA, 20 bp, synthetic construct
  misc_feature 1..20: note = Description of Artificial Sequence: Synthetic oligonucleotide
  misc_feature 1..20: note = Target: ANGPTL3; (-) strand; PAM type: YTN; PAM sequence: TTC
  source 1..20: mol_type = other DNA
ctctttcttttctattaatt

SEQ ID NO: 11490 - DNA, 20 bp, synthetic construct
  misc_feature 1..20: note = Description of Artificial Sequence: Synthetic oligonucleotide
  misc_feature 1..20: note = Target: ANGPTL3; (-) strand; PAM type: YTN; PAM sequence: TTT
  source 1..20: mol_type = other DNA
cctctttcttttctattaat

SEQ ID NO: 11491 - DNA, 20 bp, synthetic construct
  misc_feature 1..20: note = Description of Artificial Sequence: Synthetic oligonucleotide
  misc_feature 1..20: note = Target: ANGPTL3; (-) strand; PAM type: YTN; PAM sequence: CTT
  source 1..20: mol_type = other DNA
tcctctttcttttctattaa

SEQ ID NO: 11492 - DNA, 20 bp, synthetic construct
  misc_feature 1..20: note = Description of Artificial Sequence: Synthetic oligonucleotide
  misc_feature 1..20: note = Target: ANGPTL3; (-) strand; PAM type: YTN; PAM sequence: TTG
  source 1..20: mol_type = other DNA
ctttcctctttcttttctat

SEQ ID NO: 11493 - DNA, 20 bp, synthetic construct
  misc_feature 1..20: note = Description of Artificial Sequence: Synthetic oligonucleotide
  misc_feature 1..20: note = Target: ANGPTL3; (-) strand; PAM type: YTN; PAM sequence: TTA
  source 1..20: mol_type = other DNA
taagttgctttcctctttct

SEQ ID NO: 11494 - DNA, 20 bp, synthetic construct
  misc_feature 1..20: note = Description of Artificial Sequence: Synthetic oligonucleotide
  misc_feature 1..20: note = Target: ANGPTL3; (-) strand; PAM type: YTN; PAM sequence: TTG
  source 1..20: mol_type = other DNA
gttataagttgctttcctct

SEQ ID NO: 11495 - DNA, 20 bp, synthetic construct
  misc_feature 1..20: note = Description of Artificial Sequence: Synthetic oligonucleotide
  misc_feature 1..20: note = Target: ANGPTL3; (-) strand; PAM type: YTN; PAM sequence: CTG
  source 1..20: mol_type = other DNA
gatatagagagtaggttggt

SEQ ID NO: 11496 - DNA, 20 bp, synthetic construct
  misc_feature 1..20: note = Description of Artificial Sequence: Synthetic oligonucleotide
  misc_feature 1..20: note = Target: ANGPTL3; (-) strand; PAM type: YTN; PAM sequence: CTA
  source 1..20: mol_type = other DNA
caaaagtctggatatagaga

SEQ ID NO: 11497 - DNA, 20 bp, synthetic construct
  misc_feature 1..20: note = Description of Artificial Sequence: Synthetic oligonucleotide
  misc_feature 1..20: note = Target: ANGPTL3; (-) strand; PAM type: YTN; PAM sequence: TTC
  source 1..20: mol_type = other DNA
tacaaaagtctggatataga

SEQ ID NO: 11498 - DNA, 20 bp, synthetic construct
  misc_feature 1..20: note = Description of Artificial Sequence: Synthetic oligonucleotide
  misc_feature 1..20: note = Target: ANGPTL3; (-) strand; PAM type: YTN; PAM sequence: TTT
  source 1..20: mol_type = other DNA
ctacaaaagtctggatatag

SEQ ID NO: 11499 - DNA, 20 bp, synthetic construct
  misc_feature 1..20: note = Description of Artificial Sequence: Synthetic oligonucleotide
  misc_feature 1..20: note = Target: ANGPTL3; (-) strand; PAM type: YTN; PAM sequence: TTT
  source 1..20: mol_type = other DNA
tctacaaaagtctggatata

SEQ ID NO: 11500 - DNA, 20 bp, synthetic construct
  misc_feature 1..20: note = Description of Artificial Sequence: Synthetic oligonucleotide
  misc_feature 1..20: note = Target: ANGPTL3; (-) strand; PAM type: YTN; PAM sequence: TTT
  source 1..20: mol_type = other DNA
ttctacaaaagtctggatat

SEQ ID NO: 11501 - DNA, 20 bp, synthetic construct
  misc_feature 1..20: note = Description of Artificial Sequence: Synthetic oligonucleotide
  misc_feature 1..20: note = Target: ANGPTL3; (-) strand; PAM type: YTN; PAM sequence: TTG
  source 1..20: mol_type = other DNA
tttttctacaaaagtctgga

SEQ ID NO: 11502 - DNA, 20 bp, synthetic construct
  misc_feature 1..20: note = Description of Artificial Sequence: Synthetic oligonucleotide
  misc_feature 1..20: note = Target: ANGPTL3; (-) strand; PAM type: YTN; PAM sequence: CTT
  source 1..20: mol_type = other DNA
gtttttctacaaaagtctgg

SEQ ID NO: 11503 - DNA, 20 bp, synthetic construct
  misc_feature 1..20: note = Description of Artificial Sequence: Synthetic oligonucleotide
  misc_feature 1..20: note = Target: ANGPTL3; (-) strand; PAM type: YTN; PAM sequence: TTA
  source 1..20: mol_type = other DNA
tcttgtttttctacaaaagt

SEQ ID NO: 11504 - DNA, 20 bp, synthetic construct
  misc_feature 1..20: note = Description of Artificial Sequence: Synthetic oligonucleotide
  misc_feature 1..20: note = Target: ANGPTL3; (-) strand; PAM type: YTN; PAM sequence: CTA
  source 1..20: mol_type = other DNA
ttatcttgtttttctacaaa

SEQ ID NO: 11505 - DNA, 20 bp, synthetic construct
  misc_feature 1..20: note = Description of Artificial Sequence: Synthetic oligonucleotide
  misc_feature 1..20: note = Target: ANGPTL3; (-) strand; PAM type: YTN; PAM sequence: TTG
  source 1..20: mol_type = other DNA
atgctattatcttgtttttc

SEQ ID NO: 11506 - DNA, 20 bp, synthetic construct
  misc_feature 1..20: note = Description of Artificial Sequence: Synthetic oligonucleotide
  misc_feature 1..20: note = Target: ANGPTL3; (-) strand; PAM type: YTN; PAM sequence: TTT
  source 1..20: mol_type = other DNA
gatgctattatcttgttttt

SEQ ID NO: 11507 - DNA, 20 bp, synthetic construct
  misc_feature 1..20: note = Description of Artificial Sequence: Synthetic oligonucleotide
  misc_feature 1..20: note = Target: ANGPTL3; (-) strand; PAM type: YTN; PAM sequence: CTT
  source 1..20: mol_type = other DNA
tgatgctattatcttgtttt

SEQ ID NO: 11508 - DNA, 20 bp, synthetic construct
  misc_feature 1..20: note = Description of Artificial Sequence: Synthetic oligonucleotide
  misc_feature 1..20: note = Target: ANGPTL3; (-) strand; PAM type: YTN; PAM sequence: CTG
  source 1..20: mol_type = other DNA
gagaaggtctttgatgctat

SEQ ID NO: 11509 - DNA, 20 bp, synthetic construct
  misc_feature 1..20: note = Description of Artificial Sequence: Synthetic oligonucleotide
  misc_feature 1..20: note = Target: ANGPTL3; (-) strand; PAM type: YTN; PAM sequence: TTC
  source 1..20: mol_type = other DNA
cacggtctggagaaggtctt

SEQ ID NO: 11510 - DNA, 20 bp, synthetic construct
  misc_feature 1..20: note = Description of Artificial Sequence: Synthetic oligonucleotide
  misc_feature 1..20: note = Target: ANGPTL3; (-) strand; PAM type: YTN; PAM sequence: CTT
  source 1..20: mol_type = other DNA
ccacggtctggagaaggtct

SEQ ID NO: 11511 - DNA, 20 bp, synthetic construct
  misc_feature 1..20: note = Description of Artificial Sequence: Synthetic oligonucleotide
  misc_feature 1..20: note = Target: ANGPTL3; (-) strand; PAM type: YTN; PAM sequence: TTG
  source 1..20: mol_type = other DNA
gtcttccacggtctggagaa

SEQ ID NO: 11512 - DNA, 20 bp, synthetic construct
  misc_feature 1..20: note = Description of Artificial Sequence: Synthetic oligonucleotide
  misc_feature 1..20: note = Target: ANGPTL3; (-) strand; PAM type: YTN; PAM sequence: TTA
  source 1..20: mol_type = other DNA
tattggtcttccacggtctg

SEQ ID NO: 11513 - DNA, 20 bp, synthetic construct
  misc_feature 1..20: note = Description of Artificial Sequence: Synthetic oligonucleotide
  misc_feature 1..20: note = Target: ANGPTL3; (-) strand; PAM type: YTN; PAM sequence: TTT
  source 1..20: mol_type = other DNA
atattggtcttccacggtct

SEQ ID NO: 11514 - DNA, 20 bp, synthetic construct
  misc_feature 1..20: note = Description of Artificial Sequence: Synthetic oligonucleotide
  misc_feature 1..20: note = Target: ANGPTL3; (-) strand; PAM type: YTN; PAM sequence: TTG
  source 1..20: mol_type = other DNA
tttatattggtcttccacgg

SEQ ID NO: 11515 - DNA, 20 bp, synthetic construct
  misc_feature 1..20: note = Description of Artificial Sequence: Synthetic oligonucleotide
  misc_feature 1..20: note = Target: ANGPTL3; (-) strand; PAM type: YTN; PAM sequence: TTA
  source 1..20: mol_type = other DNA
attgtttatattggtcttcc

SEQ ID NO: 11516 - DNA, 20 bp, synthetic construct
  misc_feature 1..20: note = Description of Artificial Sequence: Synthetic oligonucleotide
  misc_feature 1..20: note = Target: ANGPTL3; (-) strand; PAM type: YTN; PAM sequence: TTT
  source 1..20: mol_type = other DNA
aattgtttatattggtcttc

SEQ ID NO: 11517 - DNA, 20 bp, synthetic construct
  misc_feature 1..20: note = Description of Artificial Sequence: Synthetic oligonucleotide
  misc_feature 1..20: note = Target: ANGPTL3; (-) strand; PAM type: YTN; PAM sequence: TTG
  source 1..20: mol_type = other DNA
gtttaattgtttatattggt

SEQ ID NO: 11518 - DNA, 20 bp, synthetic construct
  misc_feature 1..20: note = Description of Artificial Sequence: Synthetic oligonucleotide
  misc_feature 1..20: note = Target: ANGPTL3; (-) strand; PAM type: YTN; PAM sequence: CTG
  source 1..20: mol_type = other DNA
ttggtttaattgtttatatt

SEQ ID NO: 11519 - DNA, 20 bp, synthetic construct
  misc_feature 1..20: note = Description of Artificial Sequence: Synthetic oligonucleotide
  misc_feature 1..20: note = Target: ANGPTL3; (-) strand; PAM type: YTN; PAM sequence: CTA
  source 1..20: mol_type = other DNA
tgctgttggtttaattgttt

SEQ ID NO: 11520 - DNA, 20 bp, synthetic construct
  misc_feature 1..20: note = Description of Artificial Sequence: Synthetic oligonucleotide
  misc_feature 1..20: note = Target: ANGPTL3; (-) strand; PAM type: YTN; PAM sequence: TTG
  source 1..20: mol_type = other DNA
actatgctgttggtttaatt

SEQ ID NO: 11521 - DNA, 20 bp, synthetic construct
  misc_feature 1..20: note = Description of Artificial Sequence: Synthetic oligonucleotide
  misc_feature 1..20: note = Target: ANGPTL3; (-) strand; PAM type: YTN; PAM sequence: TTT
  source 1..20: mol_type = other DNA
gactatgctgttggtttaat

SEQ ID NO: 11522 - DNA, 20 bp, synthetic construct
  misc_feature 1..20: note = Description of Artificial Sequence: Synthetic oligonucleotide
  misc_feature 1..20: note = Target: ANGPTL3; (-) strand; PAM type: YTN; PAM sequence: TTA
  source 1..20: mol_type = other DNA
tttgactatgctgttggttt

SEQ ID NO: 11523 - DNA, 20 bp, synthetic construct
  misc_feature 1..20: note = Description of Artificial Sequence: Synthetic oligonucleotide
  misc_feature 1..20: note = Target: ANGPTL3; (-) strand; PAM type: YTN; PAM sequence: TTT
  source 1..20: mol_type = other DNA
atttgactatgctgttggtt

SEQ ID NO: 11524 - DNA, 20 bp, synthetic construct
  misc_feature 1..20: note = Description of Artificial Sequence: Synthetic oligonucleotide
  misc_feature 1..20: note = Target: ANGPTL3; (-) strand; PAM type: YTN; PAM sequence: TTT
  source 1..20: mol_type = other DNA
tatttgactatgctgttggt

SEQ ID NO: 11525 - DNA, 20 bp, synthetic construct
  misc_feature 1..20: note = Description of Artificial Sequence: Synthetic oligonucleotide
  misc_feature 1..20: note = Target: ANGPTL3; (-) strand; PAM type: YTN; PAM sequence: CTT
  source 1..20: mol_type = other DNA
ttatttgactatgctgttgg

SEQ ID NO: 11526 - DNA, 20 bp, synthetic construct
  misc_feature 1..20: note = Description of Artificial Sequence: Synthetic oligonucleotide
  misc_feature 1..20: note = Target: ANGPTL3; (-) strand; PAM type: YTN; PAM sequence: TTC
  source 1..20: mol_type = other DNA
ttttatttgactatgctgtt

SEQ ID NO: 11527 - DNA, 20 bp, synthetic construct
  misc_feature 1..20: note = Description of Artificial Sequence: Synthetic oligonucleotide
  misc_feature 1..20: note = Target: ANGPTL3; (-) strand; PAM type: YTN; PAM sequence: TTT
  source 1..20: mol_type = other DNA
cttttatttgactatgctgt

SEQ ID NO: 11528 - DNA, 20 bp, synthetic construct
  misc_feature 1..20: note = Description of Artificial Sequence: Synthetic oligonucleotide
  misc_feature 1..20: note = Target: ANGPTL3; (-) strand; PAM type: YTN; PAM sequence: CTA
  source 1..20: mol_type = other DNA
tttcttttatttgactatgc

SEQ ID NO: 11529 - DNA, 20 bp, synthetic construct
  misc_feature 1..20: note = Description of Artificial Sequence: Synthetic oligonucleotide
  misc_feature 1..20: note = Target: ANGPTL3; (-) strand; PAM type: YTN; PAM sequence: TTC
  source 1..20: mol_type = other DNA
tatttcttttatttgactat

SEQ ID NO: 11530 - DNA, 20 bp, synthetic construct
  misc_feature 1..20: note = Description of Artificial Sequence: Synthetic oligonucleotide
  misc_feature 1..20: note = Target: ANGPTL3; (-) strand; PAM type: YTN; PAM sequence: TTT
  source 1..20: mol_type = other DNA
ctatttcttttatttgacta

SEQ ID NO: 11531 - DNA, 20 bp, synthetic construct
  misc_feature 1..20: note = Description of Artificial Sequence: Synthetic oligonucleotide
  misc_feature 1..20: note = Target: ANGPTL3; (-) strand; PAM type: YTN; PAM sequence: TTT
  source 1..20: mol_type = other DNA
tctatttcttttatttgact

SEQ ID NO: 11532 - DNA, 20 bp, synthetic construct
  misc_feature 1..20: note = Description of Artificial Sequence: Synthetic oligonucleotide
  misc_feature 1..20: note = Target: ANGPTL3; (-) strand; PAM type: YTN; PAM sequence: CTG
  source 1..20: mol_type = other DNA
attttctatttcttttattt

SEQ ID NO: 11533 - DNA, 20 bp, synthetic construct
  misc_feature 1..20: note = Description of Artificial Sequence: Synthetic oligonucleotide
  misc_feature 1..20: note = Target: ANGPTL3; (-) strand; PAM type: YTN; PAM sequence: TTA
  source 1..20: mol_type = other DNA
cctgattttctatttctttt

SEQ ID NO: 11534 - DNA, 20 bp, synthetic construct
  misc_feature 1..20: note = Description of Artificial Sequence: Synthetic oligonucleotide
  misc_feature 1..20: note = Target: ANGPTL3; (-) strand; PAM type: YTN; PAM sequence: CTT
  source 1..20: mol_type = other DNA
acctgattttctatttcttt

SEQ ID NO: 11535 - DNA, 20 bp, synthetic construct
  misc_feature 1..20: note = Description of Artificial Sequence: Synthetic oligonucleotide
  misc_feature 1..20: note = Target: ANGPTL3; (-) strand; PAM type: YTN; PAM sequence: CTG
  source 1..20: mol_type = other DNA
acttacctgattttctattt

SEQ ID NO: 11536 - DNA, 20 bp, synthetic construct
  misc_feature 1..20: note = Description of Artificial Sequence: Synthetic oligonucleotide
  misc_feature 1..20: note = Target: ANGPTL3; (-) strand; PAM type: YTN; PAM sequence: TTA
  source 1..20: mol_type = other DNA
aaatactgacttacctgatt

SEQ ID NO: 11537 - DNA, 20 bp, synthetic construct
  misc_feature 1..20: note = Description of Artificial Sequence: Synthetic oligonucleotide
  misc_feature 1..20: note = Target: ANGPTL3; (-) strand; PAM type: YTN; PAM sequence: CTG
  source 1..20: mol_type = other DNA
tgtgaaagatgggacatacc

SEQ ID NO: 11538 - DNA, 20 bp, synthetic construct
  misc_feature 1..20: note = Description of Artificial Sequence: Synthetic oligonucleotide
  misc_feature 1..20: note = Target: ANGPTL3; (-) strand; PAM type: YTN; PAM sequence: TTA
  source 1..20: mol_type = other DNA
cagacctgtgtgaaagatgg

SEQ ID NO: 11539 - DNA, 20 bp, synthetic construct
  misc_feature 1..20: note = Description of Artificial Sequence: Synthetic oligonucleotide
  misc_feature 1..20: note = Target: ANGPTL3; (-) strand; PAM type: YTN; PAM sequence: TTT
  source 1..20: mol_type = other DNA
acagacctgtgtgaaagatg

SEQ ID NO: 11540 - DNA, 20 bp, synthetic construct
  misc_feature 1..20: note = Description of Artificial Sequence: Synthetic oligonucleotide
  misc_feature 1..20: note = Target: ANGPTL3; (-) strand; PAM type: YTN; PAM sequence: TTT
  source 1..20: mol_type = other DNA
tacagacctgtgtgaaagat

SEQ ID NO: 11541 - DNA, 20 bp, synthetic construct
  misc_feature 1..20: note = Description of Artificial Sequence: Synthetic oligonucleotide
  misc_feature 1..20: note = Target: ANGPTL3; (-) strand; PAM type: YTN; PAM sequence: TTT
  source 1..20: mol_type = other DNA
ttacagacctgtgtgaaaga

SEQ ID NO: 11542 - DNA, 20 bp, synthetic construct
  misc_feature 1..20: note = Description of Artificial Sequence: Synthetic oligonucleotide
  misc_feature 1..20: note = Target: ANGPTL3; (-) strand; PAM type: YTN; PAM sequence: TTC
  source 1..20: mol_type = other DNA
agtgtttttacagacctgtg

SEQ ID NO: 11543 - DNA, 20 bp, synthetic construct
  misc_feature 1..20: note = Description of Artificial Sequence: Synthetic oligonucleotide
  misc_feature 1..20: note = Target: ANGPTL3; (-) strand; PAM type: YTN; PAM sequence: TTA
  source 1..20: mol_type = other DNA
ggattcagtgtttttacaga

SEQ ID NO: 11544 - DNA, 20 bp, synthetic construct
  misc_feature 1..20: note = Description of Artificial Sequence: Synthetic oligonucleotide
  misc_feature 1..20: note = Target: ANGPTL3; (-) strand; PAM type: YTN; PAM sequence: TTT
  source 1..20: mol_type = other DNA
aggattcagtgtttttacag

SEQ ID NO: 11545 - DNA, 20 bp, synthetic construct
  misc_feature 1..20: note = Description of Artificial Sequence: Synthetic oligonucleotide
  misc_feature 1..20: note = Target: ANGPTL3; (-) strand; PAM type: YTN; PAM sequence: TTT
  source 1..20: mol_type = other DNA
taggattcagtgtttttaca

SEQ ID NO: 11546 - DNA, 20 bp, synthetic construct
  misc_feature 1..20: note = Description of Artificial Sequence: Synthetic oligonucleotide
  misc_feature 1..20: note = Target: ANGPTL3; (-) strand; PAM type: YTN; PAM sequence: TTG
  source 1..20: mol_type = other DNA
taaataattttaggattcag

SEQ ID NO: 11547 - DNA, 20 bp, synthetic construct
  misc_feature 1..20: note = Description of Artificial Sequence: Synthetic oligonucleotide
  misc_feature 1..20: note = Target: ANGPTL3; (-) strand; PAM type: YTN; PAM sequence: CTT
  source 1..20: mol_type = other DNA
gtaaataattttaggattca

SEQ ID NO: 11548 - DNA, 20 bp, synthetic construct
  misc_feature 1..20: note = Description of Artificial Sequence: Synthetic oligonucleotide
  misc_feature 1..20: note = Target: ANGPTL3; (-) strand; PAM type: YTN; PAM sequence: TTA
  source 1..20: mol_type = other DNA
aagcttgtaaataattttag

SEQ ID NO: 11549 - DNA, 20 bp, synthetic construct
  misc_feature 1..20: note = Description of Artificial Sequence: Synthetic oligonucleotide
  misc_feature 1..20: note = Target: ANGPTL3; (-) strand; PAM type: YTN; PAM sequence: CTC
  source 1..20: mol_type = other DNA
atgatccagttaaagcttgt

SEQ ID NO: 11550 - DNA, 20 bp, synthetic construct
  misc_feature 1..20: note = Description of Artificial Sequence: Synthetic oligonucleotide
  misc_feature 1..20: note = Target: ANGPTL3; (-) strand; PAM type: YTN; PAM sequence: TTA
  source 1..20: mol_type = other DNA
ctcatgatccagttaaagct

SEQ ID NO: 11551 - DNA, 20 bp, synthetic construct
  misc_feature 1..20: note = Description of Artificial Sequence: Synthetic oligonucleotide
  misc_feature 1..20: note = Target: ANGPTL3; (-) strand; PAM type: YTN; PAM sequence: TTT
  source 1..20: mol_type = other DNA
actcatgatccagttaaagc

SEQ ID NO: 11552 - DNA, 20 bp, synthetic construct
  misc_feature 1..20: note = Description of Artificial Sequence: Synthetic oligonucleotide
  misc_feature 1..20: note = Target: ANGPTL3; (-) strand; PAM type: YTN; PAM sequence: TTT
  source 1..20: mol_type = other DNA
tactcatgatccagttaaag

SEQ ID NO: 11553 - DNA, 20 bp, synthetic construct
  misc_feature 1..20: note = Description of Artificial Sequence: Synthetic oligonucleotide
  misc_feature 1..20: note = Target: ANGPTL3; (-) strand; PAM type: YTN; PAM sequence: CTG
  source 1..20: mol_type = other DNA
atgtgataattttactcatg

SEQ ID NO: 11554 - DNA, 20 bp, synthetic construct
  misc_feature 1..20: note = Description of Artificial Sequence: Synthetic oligonucleotide
  misc_feature 1..20: note = Target: ANGPTL3; (-) strand; PAM type: YTN; PAM sequence: TTA
  source 1..20: mol_type = other DNA
tgctgatgtgataattttac

SEQ ID NO: 11555 - DNA, 20 bp, synthetic construct
  misc_feature 1..20: note = Description of Artificial Sequence: Synthetic oligonucleotide
  misc_feature 1..20: note = Target: ANGPTL3; (-) strand; PAM type: YTN; PAM sequence: TTA
  source 1..20: mol_type = other DNA
acagttatgctgatgtgata

SEQ ID NO: 11556 - DNA, 20 bp, synthetic construct
  misc_feature 1..20: note = Description of Artificial Sequence: Synthetic oligonucleotide
  misc_feature 1..20: note = Target: ANGPTL3; (-) strand; PAM type: YTN; PAM sequence: TTT
  source 1..20: mol_type = other DNA
aacagttatgctgatgtgat

SEQ ID NO: 11557 - DNA, 20 bp, synthetic construct
  misc_feature 1..20: note = Description of Artificial Sequence: Synthetic oligonucleotide
  misc_feature 1..20: note = Target: ANGPTL3; (-) strand; PAM type: YTN; PAM sequence: TTT
  source 1..20: mol_type = other DNA
taacagttatgctgatgtga

SEQ ID NO: 11558 - DNA, 20 bp, synthetic construct
  misc_feature 1..20: note = Description of Artificial Sequence: Synthetic oligonucleotide
  misc_feature 1..20: note = Target: ANGPTL3; (-) strand; PAM type: YTN; PAM sequence: CTG
  source 1..20: mol_type = other DNA
caattttaacagttatgctg

SEQ ID NO: 11559 - DNA, 20 bp, synthetic construct
  misc_feature 1..20: note = Description of Artificial Sequence: Synthetic oligonucleotide
  misc_feature 1..20: note = Target: ANGPTL3; (-) strand; PAM type: YTN; PAM sequence: TTC
  source 1..20: mol_type = other DNA
agagcctgcaattttaacag

SEQ ID NO: 11560 - DNA, 20 bp, synthetic construct
  misc_feature 1..20: note = Description of Artificial Sequence: Synthetic oligonucleotide
  misc_feature 1..20: note = Target: ANGPTL3; (-) strand; PAM type: YTN; PAM sequence: CTT
  source 1..20: mol_type = other DNA
cagagcctgcaattttaaca

SEQ ID NO: 11561 - DNA, 20 bp, synthetic construct
  misc_feature 1..20: note = Description of Artificial Sequence: Synthetic oligonucleotide
  misc_feature 1..20: note = Target: ANGPTL3; (-) strand; PAM type: YTN; PAM sequence: TTA
  source 1..20: mol_type = other DNA
gcttcagagcctgcaatttt

SEQ ID NO: 11562 - DNA, 20 bp, synthetic construct
  misc_feature 1..20: note = Description of Artificial Sequence: Synthetic oligonucleotide
  misc_feature 1..20: note = Target: ANGPTL3; (-) strand; PAM type: YTN; PAM sequence: TTA
  source 1..20: mol_type = other DNA
ttagcttcagagcctgcaat

SEQ ID NO: 11563 - DNA, 20 bp, synthetic construct
  misc_feature 1..20: note = Description of Artificial Sequence: Synthetic oligonucleotide
  misc_feature 1..20: note = Target: ANGPTL3; (-) strand; PAM type: YTN; PAM sequence: TTT
  source 1..20: mol_type = other DNA
attagcttcagagcctgcaa

SEQ ID NO: 11564 - DNA, 20 bp, synthetic construct
  misc_feature 1..20: note = Description of Artificial Sequence: Synthetic oligonucleotide
  misc_feature 1..20: note = Target: ANGPTL3; (-) strand; PAM type: YTN; PAM sequence: TTA
  source 1..20: mol_type = other DNA
aatgcaggtagtttattagc

SEQ ID NO: 11565 - DNA, 20 bp, synthetic construct
  misc_feature 1..20: note = Description of Artificial Sequence: Synthetic oligonucleotide
  misc_feature 1..20: note = Target: ANGPTL3; (-) strand; PAM type: YTN; PAM sequence: TTT
  source 1..20: mol_type = other DNA
aaatgcaggtagtttattag

SEQ ID NO: 11566 - DNA, 20 bp, synthetic construct
  misc_feature 1..20: note = Description of Artificial Sequence: Synthetic oligonucleotide
  misc_feature 1..20: note = Target: ANGPTL3; (-) strand; PAM type: YTN; PAM sequence: TTA
  source 1..20: mol_type = other DNA
gagccatggtttaaatgcag

SEQ ID NO: 11567 - DNA, 20 bp, synthetic construct
  misc_feature 1..20: note = Description of Artificial Sequence: Synthetic oligonucleotide
  misc_feature 1..20: note = Target: ANGPTL3; (-) strand; PAM type: YTN; PAM sequence: TTT
  source 1..20: mol_type = other DNA
agagccatggtttaaatgca

SEQ ID NO: 11568 - DNA, 20 bp, synthetic construct
  misc_feature 1..20: note = Description of Artificial Sequence: Synthetic oligonucleotide
  misc_feature 1..20: note = Target: ANGPTL3; (-) strand; PAM type: YTN; PAM sequence: TTT
  source 1..20: mol_type = other DNA
tagagccatggtttaaatgc

SEQ ID NO: 11569 - DNA, 20 bp, synthetic construct
  misc_feature 1..20: note = Description of Artificial Sequence: Synthetic oligonucleotide
  misc_feature 1..20: note = Target: ANGPTL3; (-) strand; PAM type: YTN; PAM sequence: TTC
  source 1..20: mol_type = other DNA
aaggtcacacaaagttttag

SEQ ID NO: 11570 - DNA, 20 bp, synthetic construct
  misc_feature 1..20: note = Description of Artificial Sequence: Synthetic oligonucleotide
  misc_feature 1..20: note = Target: ANGPTL3; (-) strand; PAM type: YTN; PAM sequence: TTA
  source 1..20: mol_type = other DNA
ttcaaggtcacacaaagttt

SEQ ID NO: 11571 - DNA, 20 bp, synthetic construct
  misc_feature 1..20: note = Description of Artificial Sequence: Synthetic oligonucleotide
  misc_feature 1..20: note = Target: ANGPTL3; (-) strand; PAM type: YTN; PAM sequence: TTT
  source 1..20: mol_type = other DNA
attcaaggtcacacaaagtt

SEQ ID NO: 11572 - DNA, 20 bp, synthetic construct
  misc_feature 1..20: note = Description of Artificial Sequence: Synthetic oligonucleotide
  misc_feature 1..20: note = Target: ANGPTL3; (-) strand; PAM type: YTN; PAM sequence: CTG
  source 1..20: mol_type = other DNA
agagataaaggggtgaagta

SEQ ID NO: 11573 - DNA, 20 bp, synthetic construct
  misc_feature 1..20: note = Description of Artificial Sequence: Synthetic oligonucleotide
  misc_feature 1..20: note = Target: ANGPTL3; (-) strand; PAM type: YTN; PAM sequence: TTG
  source 1..20: mol_type = other DNA
tagtatatgtgaggaaactg

SEQ ID NO: 11574 - DNA, 20 bp, synthetic construct
  misc_feature 1..20: note = Description of Artificial Sequence: Synthetic oligonucleotide
  misc_feature 1..20: note = Target: ANGPTL3; (-) strand; PAM type: YTN; PAM sequence: TTT
  source 1..20: mol_type = other DNA
gtagtatatgtgaggaaact

SEQ ID NO: 11575 - DNA, 20 bp, synthetic construct
  misc_feature 1..20: note = Description of Artificial Sequence: Synthetic oligonucleotide
  misc_feature 1..20: note = Target: ANGPTL3; (-) strand; PAM type: YTN; PAM sequence: CTT
  source 1..20: mol_type = other DNA
tgtagtatatgtgaggaaac

SEQ ID NO: 11576 - DNA, 20 bp, synthetic construct
  misc_feature 1..20: note = Description of Artificial Sequence: Synthetic oligonucleotide
  misc_feature 1..20: note = Target: ANGPTL3; (-) strand; PAM type: YTN; PAM sequence: TTA
  source 1..20: mol_type = other DNA
tctttgtagtatatgtgagg

SEQ ID NO: 11577 - DNA, 20 bp, synthetic construct
  misc_feature 1..20: note = Description of Artificial Sequence: Synthetic oligonucleotide
  misc_feature 1..20: note = Target: ANGPTL3; (-) strand; PAM type: YTN; PAM sequence: TTA
  source 1..20: mol_type = other DNA
ttatctttgtagtatatgtg

SEQ ID NO: 11578 - DNA, 20 bp, synthetic construct
  misc_feature 1..20: note = Description of Artificial Sequence: Synthetic oligonucleotide
  misc_feature 1..20: note = Target: ANGPTL3; (-) strand; PAM type: YTN; PAM sequence: CTG
  source 1..20: mol_type = other DNA
ttattatctttgtagtatat

SEQ ID NO: 11579 - DNA, 20 bp, synthetic construct
  misc_feature 1..20: note = Description of Artificial Sequence: Synthetic oligonucleotide
  misc_feature 1..20: note = Target: ANGPTL3; (-) strand; PAM type: YTN; PAM sequence: TTC
  source 1..20: mol_type = other DNA
tgttattatctttgtagtat

SEQ ID NO: 11580 - DNA, 20 bp, synthetic construct
  misc_feature 1..20: note = Description of Artificial Sequence: Synthetic oligonucleotide
  misc_feature 1..20: note = Target: ANGPTL3; (-) strand; PAM type: YTN; PAM sequence: CTA
  source 1..20: mol_type = other DNA
taagttctgttattatcttt

SEQ ID NO: 11581 - DNA, 20 bp, synthetic construct
  misc_feature 1..20: note = Description of Artificial Sequence: Synthetic oligonucleotide
  misc_feature 1..20: note = Target: ANGPTL3; (-) strand; PAM type: YTN; PAM sequence: TTA
  source 1..20: mol_type = other DNA
caataatcctataagttctg

SEQ ID NO: 11582 - DNA, 20 bp, synthetic construct
  misc_feature 1..20: note = Description of Artificial Sequence: Synthetic oligonucleotide
  misc_feature 1..20: note = Target: ANGPTL3; (-) strand; PAM type: YTN; PAM sequence: CTT
  source 1..20: mol_type = other DNA
acaataatcctataagttct

SEQ ID NO: 11583 - DNA, 20 bp, synthetic construct
  misc_feature 1..20: note = Description of Artificial Sequence: Synthetic oligonucleotide
  misc_feature 1..20: note = Target: ANGPTL3; (-) strand; PAM type: YTN; PAM sequence: TTC
  source 1..20: mol_type = other DNA
ttacaataatcctataagtt

SEQ ID NO: 11584 - DNA, 20 bp, synthetic construct
  misc_feature 1..20: note = Description of Artificial Sequence: Synthetic oligonucleotide
  misc_feature 1..20: note = Target: ANGPTL3; (-) strand; PAM type: YTN; PAM sequence: TTT
  source 1..20: mol_type = other DNA
cttacaataatcctataagt

SEQ ID NO: 11585 - DNA, 20 bp, synthetic construct
  misc_feature 1..20: note = Description of Artificial Sequence: Synthetic oligonucleotide
  misc_feature 1..20: note = Target: ANGPTL3; (-) strand; PAM type: YTN; PAM sequence: TTT
  source 1..20: mol_type = other DNA
tcttacaataatcctataag

SEQ ID NO: 11586 - DNA, 20 bp, synthetic construct
  misc_feature 1..20: note = Description of Artificial Sequence: Synthetic oligonucleotide
  misc_feature 1..20: note = Target: ANGPTL3; (-) strand; PAM type: YTN; PAM sequence: TTT
  source 1..20: mol_type = other DNA
ttcttacaataatcctataa

SEQ ID NO: 11587 - DNA, 20 bp, synthetic construct
  misc_feature 1..20: note = Description of Artificial Sequence: Synthetic oligonucleotide
  misc_feature 1..20: note = Target: ANGPTL3; (-) strand; PAM type: YTN; PAM sequence: TTT
  source 1..20: mol_type = other DNA
tttcttacaataatcctata

SEQ ID NO: 11588 - DNA, 20 bp, synthetic construct
  misc_feature 1..20: note = Description of Artificial Sequence: Synthetic oligonucleotide
  misc_feature 1..20: note = Target: ANGPTL3; (-) strand; PAM type: YTN; PAM sequence: TTT
  source 1..20: mol_type = other DNA
ttttcttacaataatcctat

SEQ ID NO: 11589 - DNA, 20 bp, synthetic construct
  misc_feature 1..20: note = Description of Artificial Sequence: Synthetic oligonucleotide
  misc_feature 1..20: note = Target: ANGPTL3; (-) strand; PAM type: YTN; PAM sequence: TTT
  source 1..20: mol_type = other DNA
tttttcttacaataatccta

SEQ ID NO: 11590 - DNA, 20 bp, synthetic construct
  misc_feature 1..20: note = Description of Artificial Sequence: Synthetic oligonucleotide
  misc_feature 1..20: note = Target: ANGPTL3; (-) strand; PAM type: YTN; PAM sequence: TTA
  source 1..20: mol_type = other DNA
attttttttcttacaataat

SEQ ID NO: 11591 - DNA, 20 bp, synthetic construct
  misc_feature 1..20: note = Description of Artificial Sequence: Synthetic oligonucleotide
  misc_feature 1..20: note = Target: ANGPTL3; (-) strand; PAM type: YTN; PAM sequence: CTA
  source 1..20: mol_type = other DNA
tgaattaattttttttctta

SEQ ID NO: 11592 - DNA, 20 bp, synthetic construct
  misc_feature 1..20: note = Description of Artificial Sequence: Synthetic oligonucleotide
  misc_feature 1..20: note = Target: ANGPTL3; (-) strand; PAM type: YTN; PAM sequence: CTG
  source 1..20: mol_type = other DNA
ctatgaattaattttttttc

SEQ ID NO: 11593 - DNA, 20 bp, synthetic construct
  misc_feature 1..20: note = Description of Artificial Sequence: Synthetic oligonucleotide
  misc_feature 1..20: note = Target: ANGPTL3; (-) strand; PAM type: YTN; PAM sequence: TTG
  source 1..20: mol_type = other DNA
gctgctatgaattaattttt

SEQ ID NO: 11594 - DNA, 20 bp, synthetic construct
  misc_feature 1..20: note = Description of Artificial Sequence: Synthetic oligonucleotide
  misc_feature 1..20: note = Target: ANGPTL3; (-) strand; PAM type: YTN; PAM sequence: TTA
  source 1..20: mol_type = other DNA
gtaagatgacattggctgct

SEQ ID NO: 11595 - DNA, 20 bp, synthetic construct
  misc_feature 1..20: note = Description of Artificial Sequence: Synthetic oligonucleotide
  misc_feature 1..20: note = Target: ANGPTL3; (-) strand; PAM type: YTN; PAM sequence: TTT
  source 1..20: mol_type = other DNA
agtaagatgacattggctgc

SEQ ID NO: 11596 - DNA, 20 bp, synthetic construct
  misc_feature 1..20: note = Description of Artificial Sequence: Synthetic oligonucleotide
  misc_feature 1..20: note = Target: ANGPTL3; (-) strand; PAM type: YTN; PAM sequence: TTT
  source 1..20: mol_type = other DNA
tagtaagatgacattggctg

SEQ ID NO: 11597 - DNA, 20 bp, synthetic construct
  misc_feature 1..20: note = Description of Artificial Sequence: Synthetic oligonucleotide
  misc_feature 1..20: note = Target: ANGPTL3; (-) strand; PAM type: YTN; PAM sequence: TTG
  source 1..20: mol_type = other DNA
aattttagtaagatgacatt

SEQ ID NO: 11598 - DNA, 20 bp, synthetic construct
  misc_feature 1..20: note = Description of Artificial Sequence: Synthetic oligonucleotide
  misc_feature 1..20: note = Target: ANGPTL3; (-) strand; PAM type: YTN; PAM sequence: TTT
  source 1..20: mol_type = other DNA
gaattttagtaagatgacat

SEQ ID NO: 11599 - DNA, 20 bp, synthetic construct
  misc_feature 1..20: note = Description of Artificial Sequence: Synthetic oligonucleotide
  misc_feature 1..20: note = Target: ANGPTL3; (-) strand; PAM type: YTN; PAM sequence: CTA
  source 1..20: mol_type = other DNA
atttgaattttagtaagatg

SEQ ID NO: 11600 - DNA, 20 bp, synthetic construct
  misc_feature 1..20: note = Description of Artificial Sequence: Synthetic oligonucleotide
  misc_feature 1..20: note = Target: ANGPTL3; (-) strand; PAM type: YTN; PAM sequence: TTG
  source 1..20: mol_type = other DNA
agcaaagagaaacatgatct

SEQ ID NO: 11601 - DNA, 20 bp, synthetic construct
  misc_feature 1..20: note = Description of Artificial Sequence: Synthetic oligonucleotide
  misc_feature 1..20: note = Target: ANGPTL3; (-) strand; PAM type: YTN; PAM sequence: TTT
  source 1..20: mol_type = other DNA
gagcaaagagaaacatgatc

SEQ ID NO: 11602 - DNA, 20 bp, synthetic construct
  misc_feature 1..20: note = Description of Artificial Sequence: Synthetic oligonucleotide
  misc_feature 1..20: note = Target: ANGPTL3; (-) strand; PAM type: YTN; PAM sequence: TTT
  source 1..20: mol_type = other DNA
tgagcaaagagaaacatgat

SEQ ID NO: 11603 - DNA, 20 bp, synthetic construct
  misc_feature 1..20: note = Description of Artificial Sequence: Synthetic oligonucleotide
  misc_feature 1..20: note = Target: ANGPTL3; (-) strand; PAM type: YTN; PAM sequence: TTG
  source 1..20: mol_type = other DNA
tgtggttttgagcaaagaga

SEQ ID NO: 11604 - DNA, 20 bp, synthetic construct
  misc_feature 1..20: note = Description of Artificial Sequence: Synthetic oligonucleotide
  misc_feature 1..20: note = Target: ANGPTL3; (-) strand; PAM type: YTN; PAM sequence: CTA
  source 1..20: mol_type = other DNA
ttgtgtggttttgagcaaag

SEQ ID NO: 11605 - DNA, 20 bp, synthetic construct
  misc_feature 1..20: note = Description of Artificial Sequence: Synthetic oligonucleotide
  misc_feature 1..20: note = Target: ANGPTL3; (-) strand; PAM type: YTN; PAM sequence: CTA
  source 1..20: mol_type = other DNA
aagagccaatatgagtgaaa

SEQ ID NO: 11606 - DNA, 20 bp, synthetic construct
  misc_feature 1..20: note = Description of Artificial Sequence: Synthetic oligonucleotide
  misc_feature 1..20: note = Target: ANGPTL3; (-) strand; PAM type: YTN; PAM sequence: TTG
  source 1..20: mol_type = other DNA
gtctaaagagccaatatgag

SEQ ID NO: 11607 - DNA, 20 bp, synthetic construct
  misc_feature 1..20: note = Description of Artificial Sequence: Synthetic oligonucleotide
  misc_feature 1..20: note = Target: ANGPTL3; (-) strand; PAM type: YTN; PAM sequence: CTT
  source 1..20: mol_type = other DNA
ggtctaaagagccaatatga

SEQ ID NO: 11608 - DNA, 20 bp, synthetic construct
  misc_feature 1..20: note = Description of Artificial Sequence: Synthetic oligonucleotide
  misc_feature 1..20: note = Target: ANGPTL3; (-) strand; PAM type: YTN; PAM sequence: TTG
  source 1..20: mol_type = other DNA
ggtaatcttggtctaaagag

SEQ ID NO: 11609 - DNA, 20 bp, synthetic construct
  misc_feature 1..20: note = Description of Artificial Sequence: Synthetic oligonucleotide
  misc_feature 1..20: note = Target: ANGPTL3; (-) strand; PAM type: YTN; PAM sequence: CTA
  source 1..20: mol_type = other DNA
gagtagaggaggtgaagtca

SEQ ID NO: 11610 - DNA, 20 bp, synthetic construct
  misc_feature 1..20: note = Description of Artificial Sequence: Synthetic oligonucleotide
  misc_feature 1..20: note = Target: ANGPTL3; (-) strand; PAM type: YTN; PAM sequence: CTG
  source 1..20: mol_type = other DNA
gtaaagcggtcagaataact

SEQ ID NO: 11611 - DNA, 20 bp, synthetic construct
  misc_feature 1..20: note = Description of Artificial Sequence: Synthetic oligonucleotide
  misc_feature 1..20: note = Target: ANGPTL3; (-) strand; PAM type: YTN; PAM sequence: TTG
  source 1..20: mol_type = other DNA
aatactggtaaagcggtcag

SEQ ID NO: 11612 - DNA, 20 bp, synthetic construct
  misc_feature 1..20: note = Description of Artificial Sequence: Synthetic oligonucleotide
  misc_feature 1..20: note = Target: ANGPTL3; (-) strand; PAM type: YTN; PAM sequence: TTT
  source 1..20: mol_type = other DNA
gaatactggtaaagcggtca

SEQ ID NO: 11613 - DNA, 20 bp, synthetic construct
  misc_feature 1..20: note = Description of Artificial Sequence: Synthetic oligonucleotide
  misc_feature 1..20: note = Target: ANGPTL3; (-) strand; PAM type: YTN; PAM sequence: TTG
  source 1..20: mol_type = other DNA
atgtgtttgaatactggtaa

SEQ ID NO: 11614 - DNA, 20 bp, synthetic construct
  misc_feature 1..20: note = Description of Artificial Sequence: Synthetic oligonucleotide
  misc_feature 1..20: note = Target: ANGPTL3; (-) strand; PAM type: YTN; PAM sequence: TTT
  source 1..20: mol_type = other DNA
gatgtgtttgaatactggta

SEQ ID NO: 11615 - DNA, 20 bp, synthetic construct
  misc_feature 1..20: note = Description of Artificial Sequence: Synthetic oligonucleotide
  misc_feature 1..20: note = Target: ANGPTL3; (-) strand; PAM type: YTN; PAM sequence: TTG
  source 1..20: mol_type = other DNA
aggtggcagtatgtttgatg

SEQ ID NO: 11616 - DNA, 20 bp, synthetic construct
  misc_feature 1..20: note = Description of Artificial Sequence: Synthetic oligonucleotide
  misc_feature 1..20: note = Target: ANGPTL3; (-) strand; PAM type: YTN; PAM sequence: TTT
  source 1..20: mol_type = other DNA
gaggtggcagtatgtttgat

SEQ ID NO: 11617 - DNA, 20 bp, synthetic construct
  misc_feature 1..20: note = Description of Artificial Sequence: Synthetic oligonucleotide
  misc_feature 1..20: note = Target: ANGPTL3; (-) strand; PAM type: YTN; PAM sequence: CTT
  source 1..20: mol_type = other DNA
tgaggtggcagtatgtttga

SEQ ID NO: 11618 - DNA, 20 bp, synthetic construct
  misc_feature 1..20: note = Description of Artificial Sequence: Synthetic oligonucleotide
  misc_feature 1..20: note = Target: ANGPTL3; (-) strand; PAM type: YTN; PAM sequence: TTA
  source 1..20: mol_type = other DNA
gaggaaacaacaagggcaaa

SEQ ID NO: 11619 - DNA, 20 bp, synthetic construct
  misc_feature 1..20: note = Description of Artificial Sequence: Synthetic oligonucleotide
  misc_feature 1..20: note = Target: ANGPTL3; (-) strand; PAM type: YTN; PAM sequence: TTC
  source 1..20: mol_type = other DNA
cagttagaggaaacaacaag

SEQ ID NO: 11620 - DNA, 20 bp, synthetic construct
  misc_feature 1..20: note = Description of Artificial Sequence: Synthetic oligonucleotide
  misc_feature 1..20: note = Target: ANGPTL3; (-) strand; PAM type: YTN; PAM sequence: CTA
  source 1..20: mol_type = other DNA
agggaaatcagagagtgggc

SEQ ID NO: 11621 - DNA, 20 bp, synthetic construct
  misc_feature 1..20: note = Description of Artificial Sequence: Synthetic oligonucleotide
  misc_feature 1..20: note = Target: ANGPTL3; (-) strand; PAM type: YTN; PAM sequence: TTG
  source 1..20: mol_type = other DNA
ataacgaccctaagggaaat

SEQ ID NO: 11622 - DNA, 20 bp, synthetic construct
  misc_feature 1..20: note = Description of Artificial Sequence: Synthetic oligonucleotide
  misc_feature 1..20: note = Target: ANGPTL3; (-) strand; PAM type: YTN; PAM sequence: TTT
  source 1..20: mol_type = other DNA
gataacgaccctaagggaaa

SEQ ID NO: 11623 - DNA, 20 bp, synthetic construct
  misc_feature 1..20: note = Description of Artificial Sequence: Synthetic oligonucleotide
  misc_feature 1..20: note = Target: ANGPTL3; (-) strand; PAM type: YTN; PAM sequence: TTG
  source 1..20: mol_type = other DNA
tttgataacgaccctaaggg

SEQ ID NO: 11624 - DNA, 20 bp, synthetic construct
  misc_feature 1..20: note = Description of Artificial Sequence: Synthetic oligonucleotide
  misc_feature 1..20: note = Target: ANGPTL3; (-) strand; PAM type: YTN; PAM sequence: TTT
  source 1..20: mol_type = other DNA
gtttgataacgaccctaagg

SEQ ID NO: 11625 - DNA, 20 bp, synthetic construct
  misc_feature 1..20: note = Description of Artificial Sequence: Synthetic oligonucleotide
  misc_feature 1..20: note = Target: ANGPTL3; (-) strand; PAM type: YTN; PAM sequence: TTT
  source 1..20: mol_type = other DNA
tgtttgataacgaccctaag

SEQ ID NO: 11626 - DNA, 20 bp, synthetic construct
  misc_feature 1..20: note = Description of Artificial Sequence: Synthetic oligonucleotide
  misc_feature 1..20: note = Target: ANGPTL3; (-) strand; PAM type: YTN; PAM sequence: TTT
  source 1..20: mol_type = other DNA
ttgtttgataacgaccctaa

SEQ ID NO: 11627 - DNA, 20 bp, synthetic construct
  misc_feature 1..20: note = Description of Artificial Sequence: Synthetic oligonucleotide
  misc_feature 1..20: note = Target: ANGPTL3; (-) strand; PAM type: YTN; PAM sequence: TTT
  source 1..20: mol_type = other DNA
tttgtttgataacgacccta

SEQ ID NO: 11628 - DNA, 20 bp, synthetic construct
  misc_feature 1..20: note = Description of Artificial Sequence: Synthetic oligonucleotide
  misc_feature 1..20: note = Target: ANGPTL3; (-) strand; PAM type: YTN; PAM sequence: TTG
  source 1..20: mol_type = other DNA
ggaattttttgtttgataac

SEQ ID NO: 11629 - DNA, 20 bp, synthetic construct
  misc_feature 1..20: note = Description of Artificial Sequence: Synthetic oligonucleotide
  misc_feature 1..20: note = Target: ANGPTL3; (-) strand; PAM type: YTN; PAM sequence: TTC
  source 1..20: mol_type = other DNA
attgggaattttttgtttga

SEQ ID NO: 11630 - DNA, 20 bp, synthetic construct
  misc_feature 1..20: note = Description of Artificial Sequence: Synthetic oligonucleotide
  misc_feature 1..20: note = Target: ANGPTL3; (-) strand; PAM type: YTN; PAM sequence: CTT
  source 1..20: mol_type = other DNA
cattgggaattttttgtttg

SEQ ID NO: 11631 - DNA, 20 bp, synthetic construct
  misc_feature 1..20: note = Description of Artificial Sequence: Synthetic oligonucleotide
  misc_feature 1..20: note = Target: ANGPTL3; (-) strand; PAM type: YTN; PAM sequence: TTG
  source 1..20: mol_type = other DNA
taagtcttcattgggaattt

SEQ ID NO: 11632 - DNA, 20 bp, synthetic construct
  misc_feature 1..20: note = Description of Artificial Sequence: Synthetic oligonucleotide
  misc_feature 1..20: note = Target: ANGPTL3; (-) strand; PAM type: YTN; PAM sequence: CTT
  source 1..20: mol_type = other DNA
gtaagtcttcattgggaatt

SEQ ID NO: 11633 - DNA, 20 bp, synthetic construct
  misc_feature 1..20: note = Description of Artificial Sequence: Synthetic oligonucleotide
  misc_feature 1..20: note = Target: ANGPTL3; (-) strand; PAM type: YTN; PAM sequence: TTA
  source 1..20: mol_type = other DNA
agtgaccttgtaagtcttca

SEQ ID NO: 11634 - DNA, 20 bp, synthetic construct
  misc_feature 1..20: note = Description of Artificial Sequence: Synthetic oligonucleotide
  misc_feature 1..20: note = Target: ANGPTL3; (-) strand; PAM type: YTN; PAM sequence: TTG
  source 1..20: mol_type = other DNA
gttaagtgaccttgtaagtc

SEQ ID NO: 11635 - DNA, 20 bp, synthetic construct
  misc_feature 1..20: note = Description of Artificial Sequence: Synthetic oligonucleotide
  misc_feature 1..20: note = Target: ANGPTL3; (-) strand; PAM type: YTN; PAM sequence: TTT
  source 1..20: mol_type = other DNA
ggttaagtgaccttgtaagt

SEQ ID NO: 11636 - DNA, 20 bp, synthetic construct
  misc_feature 1..20: note = Description of Artificial Sequence: Synthetic oligonucleotide
  misc_feature 1..20: note = Target: ANGPTL3; (-) strand; PAM type: YTN; PAM sequence: TTT
  source 1..20: mol_type = other DNA
tggttaagtgaccttgtaag

SEQ ID NO: 11637 - DNA, 20 bp, synthetic construct
  misc_feature 1..20: note = Description of Artificial Sequence: Synthetic oligonucleotide
  misc_feature 1..20: note = Target: ANGPTL3; (-) strand; PAM type: YTN; PAM sequence: TTT
  source 1..20: mol_type = other DNA
ttggttaagtgaccttgtaa

SEQ ID NO: 11638 - DNA, 20 bp, synthetic construct
  misc_feature 1..20: note = Description of Artificial Sequence: Synthetic oligonucleotide
  misc_feature 1..20: note = Target: ANGPTL3; (-) strand; PAM type: YTN; PAM sequence: TTG
  source 1..20: mol_type = other DNA
tgatttttggttaagtgacc

SEQ ID NO: 11639 - DNA, 20 bp, synthetic construct
  misc_feature 1..20: note = Description of Artificial Sequence: Synthetic oligonucleotide
  misc_feature 1..20: note = Target: ANGPTL3; (-) strand; PAM type: YTN; PAM sequence: TTC
  source 1..20: mol_type = other DNA
agggatgggaccaggcggtt

SEQ ID NO: 11640 - DNA, 20 bp, synthetic construct
  misc_feature 1..20: note = Description of Artificial Sequence: Synthetic oligonucleotide
  misc_feature 1..20: note = Target: ANGPTL3; (-) strand; PAM type: YTN; PAM sequence: TTT
  source 1..20: mol_type = other DNA
cagggatgggaccaggcggt

SEQ ID NO: 11641 - DNA, 20 bp, synthetic construct
  misc_feature 1..20: note = Description of Artificial Sequence: Synthetic oligonucleotide
  misc_feature 1..20: note = Target: ANGPTL3; (-) strand; PAM type: YTN; PAM sequence: TTT
  source 1..20: mol_type = other DNA
tcagggatgggaccaggcgg

SEQ ID NO: 11642 - DNA, 20 bp, synthetic construct
  misc_feature 1..20: note = Description of Artificial Sequence: Synthetic oligonucleotide
  misc_feature 1..20: note = Target: ANGPTL3; (-) strand; PAM type: YTN; PAM sequence: CTA
  source 1..20: mol_type = other DNA
aggaagtagaagttttcagg

SEQ ID NO: 11643 - DNA, 20 bp, synthetic construct
  misc_feature 1..20: note = Description of Artificial Sequence: Synthetic oligonucleotide
  misc_feature 1..20: note = Target: ANGPTL3; (-) strand; PAM type: YTN; PAM sequence: TTA
  source 1..20: mol_type = other DNA
aataaaggtgagtgtgcagg

SEQ ID NO: 11644 - DNA, 20 bp, synthetic construct
  misc_feature 1..20: note = Description of Artificial Sequence: Synthetic oligonucleotide
  misc_feature 1..20: note = Target: ANGPTL3; (-) strand; PAM type: YTN; PAM sequence: TTA
  source 1..20: mol_type = other DNA
tgttaaataaaggtgagtgt

SEQ ID NO: 11645 - DNA, 20 bp, synthetic construct
  misc_feature 1..20: note = Description of Artificial Sequence: Synthetic oligonucleotide
  misc_feature 1..20: note = Target: ANGPTL3; (-) strand; PAM type: YTN; PAM sequence: TTA
  source 1..20: mol_type = other DNA
tgttatgttaaataaaggtg

SEQ ID NO: 11646 - DNA, 20 bp, synthetic construct
  misc_feature 1..20: note = Description of Artificial Sequence: Synthetic oligonucleotide
  misc_feature 1..20: note = Target: ANGPTL3; (-) strand; PAM type: YTN; PAM sequence: TTT
  source 1..20: mol_type = other DNA
atgttatgttaaataaaggt

SEQ ID NO: 11647 - DNA, 20 bp, synthetic construct
  misc_feature 1..20: note = Description of Artificial Sequence: Synthetic oligonucleotide
  misc_feature 1..20: note = Target: ANGPTL3; (-) strand; PAM type: YTN; PAM sequence: CTA
  source 1..20: mol_type = other DNA
aaatttatgttatgttaaat

SEQ ID NO: 11648 - DNA, 20 bp, synthetic construct
  misc_feature 1..20: note = Description of Artificial Sequence: Synthetic oligonucleotide
  misc_feature 1..20: note = Target: ANGPTL3; (-) strand; PAM type: YTN; PAM sequence: TTA
  source 1..20: mol_type = other DNA
gtgcaggaatagaagagata

SEQ ID NO: 11649 - DNA, 20 bp, synthetic construct
  misc_feature 1..20: note = Description of Artificial Sequence: Synthetic oligonucleotide
  misc_feature 1..20: note = Target: ANGPTL3; (-) strand; PAM type: YTN; PAM sequence: TTT
  source 1..20: mol_type = other DNA
agtgcaggaatagaagagat

SEQ ID NO: 11650 - DNA, 20 bp, synthetic construct
  misc_feature 1..20: note = Description of Artificial Sequence: Synthetic oligonucleotide
  misc_feature 1..20: note = Target: ANGPTL3; (-) strand; PAM type: YTN; PAM sequence: TTT
  source 1..20: mol_type = other DNA
tagtgcaggaatagaagaga

SEQ ID NO: 11651 - DNA, 20 bp, synthetic construct
  misc_feature 1..20: note = Description of Artificial Sequence: Synthetic oligonucleotide
  misc_feature 1..20: note = Target: ANGPTL3; (-) strand; PAM type: YTN; PAM sequence: TTA
  source 1..20: mol_type = other DNA
cattttagtgcaggaataga

SEQ ID NO: 11652 - DNA, 20 bp, synthetic construct
  misc_feature 1..20: note = Description of Artificial Sequence: Synthetic oligonucleotide
  misc_feature 1..20: note = Target: ANGPTL3; (-) strand; PAM type: YTN; PAM sequence: CTT
  source 1..20: mol_type = other DNA
acattttagtgcaggaatag

SEQ ID NO: 11653 - DNA, 20 bp, synthetic construct
  misc_feature 1..20: note = Description of Artificial Sequence: Synthetic oligonucleotide
  misc_feature 1..20: note = Target: ANGPTL3; (-) strand; PAM type: YTN; PAM sequence: TTC
  source 1..20: mol_type = other DNA
acagagcttacattttagtg

SEQ ID NO: 11654 - DNA, 20 bp, synthetic construct
  misc_feature 1..20: note = Description of Artificial Sequence: Synthetic oligonucleotide
  misc_feature 1..20: note = Target: ANGPTL3; (-) strand; PAM type: YTN; PAM sequence: CTG
  source 1..20: mol_type = other DNA
tattcacagagcttacattt

SEQ ID NO: 11655 - DNA, 20 bp, synthetic construct
  misc_feature 1..20: note = Description of Artificial Sequence: Synthetic oligonucleotide
  misc_feature 1..20: note = Target: ANGPTL3; (-) strand; PAM type: YTN; PAM sequence: CTG
  source 1..20: mol_type = other DNA
gagtatatacaaataatgga

SEQ ID NO: 11656 - DNA, 20 bp, synthetic construct
  misc_feature 1..20: note = Description of Artificial Sequence: Synthetic oligonucleotide
  misc_feature 1..20: note = Target: ANGPTL3; (-) strand; PAM type: YTN; PAM sequence: TTC
  source 1..20: mol_type = other DNA
tggagtatatacaaataatg

SEQ ID NO: 11657 - DNA, 20 bp, synthetic construct
  misc_feature 1..20: note = Description of Artificial Sequence: Synthetic oligonucleotide
  misc_feature 1..20: note = Target: ANGPTL3; (-) strand; PAM type: YTN; PAM sequence: CTA
  source 1..20: mol_type = other DNA
tattctggagtatatacaaa

SEQ ID NO: 11658 - DNA, 20 bp, synthetic construct
  misc_feature 1..20: note = Description of Artificial Sequence: Synthetic oligonucleotide
  misc_feature 1..20: note = Target: ANGPTL3; (-) strand; PAM type: YTN; PAM sequence: TTC
  source 1..20: mol_type = other DNA
tatattctggagtatataca

SEQ ID NO: 11659 - DNA, 20 bp, synthetic construct
  misc_feature 1..20: note = Description of Artificial Sequence: Synthetic oligonucleotide
  misc_feature 1..20: note = Target: ANGPTL3; (-) strand; PAM type: YTN; PAM sequence: CTG
  source 1..20: mol_type = other DNA
tgtgccatacagtattctat

SEQ ID NO: 11660 - DNA, 20 bp, synthetic construct
  misc_feature 1..20: note = Description of Artificial Sequence: Synthetic oligonucleotide
  misc_feature 1..20: note = Target: ANGPTL3; (-) strand; PAM type: YTN; PAM sequence: CTA
  source 1..20: mol_type = other DNA
ctgtgtgccatacagtattc

SEQ ID NO: 11661 - DNA, 20 bp, synthetic construct
  misc_feature 1..20: note = Description of Artificial Sequence: Synthetic oligonucleotide
  misc_feature 1..20: note = Target: ANGPTL3; (-) strand; PAM type: YTN; PAM sequence: TTC
  source 1..20: mol_type = other DNA
aacagaaatgcctactgtgt

SEQ ID NO: 11662 - DNA, 20 bp, synthetic construct
  misc_feature 1..20: note = Description of Artificial Sequence: Synthetic oligonucleotide
  misc_feature 1..20: note = Target: ANGPTL3; (-) strand; PAM type: YTN; PAM sequence: TTA
  source 1..20: mol_type = other DNA
attcaacagaaatgcctact

SEQ ID NO: 11663 - DNA, 20 bp, synthetic construct
  misc_feature 1..20: note = Description of Artificial Sequence: Synthetic oligonucleotide
  misc_feature 1..20: note = Target: ANGPTL3; (-) strand; PAM type: YTN; PAM sequence: TTA
  source 1..20: mol_type = other DNA
ttaattcaacagaaatgcct

SEQ ID NO: 11664 - DNA, 20 bp, synthetic construct
  misc_feature 1..20: note = Description of Artificial Sequence: Synthetic oligonucleotide
  misc_feature 1..20: note = Target: ANGPTL3; (-) strand; PAM type: YTN; PAM sequence: TTT
  source 1..20: mol_type = other DNA
attaattcaacagaaatgcc

SEQ ID NO: 11665 - DNA, 20 bp, synthetic construct
  misc_feature 1..20: note = Description of Artificial Sequence: Synthetic oligonucleotide
  misc_feature 1..20: note = Target: ANGPTL3; (-) strand; PAM type: YTN; PAM sequence: TTA
  source 1..20: mol_type = other DNA
catttattaattcaacagaa

SEQ ID NO: 11666 - DNA, 20 bp, synthetic construct
  misc_feature 1..20: note = Description of Artificial Sequence: Synthetic oligonucleotide
  misc_feature 1..20: note = Target: ANGPTL3; (-) strand; PAM type: YTN; PAM sequence: CTG
  source 1..20: mol_type = other DNA
tgtgaatatgacattacatt

SEQ ID NO: 11667 - DNA, 20 bp, synthetic construct
  misc_feature 1..20: note = Description of Artificial Sequence: Synthetic oligonucleotide
  misc_feature 1..20: note = Target: ANGPTL3; (-) strand; PAM type: YTN; PAM sequence: TTC
  source 1..20: mol_type = other DNA
tgtgtgaatatgacattaca

SEQ ID NO: 11668 - DNA, 20 bp, synthetic construct
  misc_feature 1..20: note = Description of Artificial Sequence: Synthetic oligonucleotide
  misc_feature 1..20: note = Target: ANGPTL3; (-) strand; PAM type: YTN; PAM sequence: CTT
  source 1..20: mol_type = other DNA
ctgtgtgaatatgacattac

SEQ ID NO: 11669 - DNA, 20 bp, synthetic construct
  misc_feature 1..20: note = Description of Artificial Sequence: Synthetic oligonucleotide
  misc_feature 1..20: note = Target: ANGPTL3; (-) strand; PAM type: YTN; PAM sequence: CTA
  source 1..20: mol_type = other DNA
gtaatccaagtaataataat

SEQ ID NO: 11670 - DNA, 20 bp, synthetic construct
  misc_feature 1..20: note = Description of Artificial Sequence: Synthetic oligonucleotide
  misc_feature 1..20: note = Target: ANGPTL3; (-) strand; PAM type: YTN; PAM sequence: TTC
  source 1..20: mol_type = other DNA
tagtaatccaagtaataata

SEQ ID NO: 11671 - DNA, 20 bp, synthetic construct
  misc_feature 1..20: note = Description of Artificial Sequence: Synthetic oligonucleotide
  misc_feature 1..20: note = Target: ANGPTL3; (-) strand; PAM type: YTN; PAM sequence: TTT
  source 1..20: mol_type = other DNA
ctagtaatccaagtaataat

SEQ ID NO: 11672 - DNA, 20 bp, synthetic construct
  misc_feature 1..20: note = Description of Artificial Sequence: Synthetic oligonucleotide
  misc_feature 1..20: note = Target: ANGPTL3; (-) strand; PAM type: YTN; PAM sequence: CTA
  source 1..20: mol_type = other DNA
tttctagtaatccaagtaat

SEQ ID NO: 11673 - DNA, 20 bp, synthetic construct
  misc_feature 1..20: note = Description of Artificial Sequence: Synthetic oligonucleotide
  misc_feature 1..20: note = Target: ANGPTL3; (-) strand; PAM type: YTN; PAM sequence: TTA
  source 1..20: mol_type = other DNA
tgaggcacactatttctagt

SEQ ID NO: 11674 - DNA, 20 bp, synthetic construct
  misc_feature 1..20: note = Description of Artificial Sequence: Synthetic oligonucleotide
  misc_feature 1..20: note = Target: ANGPTL3; (-) strand; PAM type: YTN; PAM sequence: TTA
  source 1..20: mol_type = other DNA
attatgaggcacactatttc

SEQ ID NO: 11675 - DNA, 20 bp, synthetic construct
  misc_feature 1..20: note = Description of Artificial Sequence: Synthetic oligonucleotide
  misc_feature 1..20: note = Target: ANGPTL3; (-) strand; PAM type: YTN; PAM sequence: TTT
  source 1..20: mol_type = other DNA
aattatgaggcacactattt

SEQ ID NO: 11676 - DNA, 20 bp, synthetic construct
  misc_feature 1..20: note = Description of Artificial Sequence: Synthetic oligonucleotide
  misc_feature 1..20: note = Target: ANGPTL3; (-) strand; PAM type: YTN; PAM sequence: CTT
  source 1..20: mol_type = other DNA
taattatgaggcacactatt

SEQ ID NO: 11677 - DNA, 20 bp, synthetic construct
  misc_feature 1..20: note = Description of Artificial Sequence: Synthetic oligonucleotide
  misc_feature 1..20: note = Target: ANGPTL3; (-) strand; PAM type: YTN; PAM sequence: TTG
  source 1..20: mol_type = other DNA
acctttaattatgaggcaca

SEQ ID NO: 11678 - DNA, 20 bp, synthetic construct
  misc_feature 1..20: note = Description of Artificial Sequence: Synthetic oligonucleotide
  misc_feature 1..20: note = Target: ANGPTL3; (-) strand; PAM type: YTN; PAM sequence: TTG
  source 1..20: mol_type = other DNA
aatgttgacctttaattatg

SEQ ID NO: 11679 - DNA, 20 bp, synthetic construct
  misc_feature 1..20: note = Description of Artificial Sequence: Synthetic oligonucleotide
  misc_feature 1..20: note = Target: ANGPTL3; (-) strand; PAM type: YTN; PAM sequence: TTG
  source 1..20: mol_type = other DNA
ttgaatgttgacctttaatt

SEQ ID NO: 11680 - DNA, 20 bp, synthetic construct
  misc_feature 1..20: note = Description of Artificial Sequence: Synthetic oligonucleotide
  misc_feature 1..20: note = Target: ANGPTL3; (-) strand; PAM type: YTN; PAM sequence: TTA
  source 1..20: mol_type = other DNA
cattgttgaatgttgacctt

SEQ ID NO: 11681 - DNA, 20 bp, synthetic construct
  misc_feature 1..20: note = Description of Artificial Sequence: Synthetic oligonucleotide
  misc_feature 1..20: note = Target: ANGPTL3; (-) strand; PAM type: YTN; PAM sequence: TTA
  source 1..20: mol_type = other DNA
attacattgttgaatgttga

SEQ ID NO: 11682 - DNA, 20 bp, synthetic construct
  misc_feature 1..20: note = Description of Artificial Sequence: Synthetic oligonucleotide
  misc_feature 1..20: note = Target: ANGPTL3; (-) strand; PAM type: YTN; PAM sequence: TTG
  source 1..20: mol_type = other DNA
tagattaattacattgttga

SEQ ID NO: 11683 - DNA, 20 bp, synthetic construct
  misc_feature 1..20: note = Description of Artificial Sequence: Synthetic oligonucleotide
  misc_feature 1..20: note = Target: ANGPTL3; (-) strand; PAM type: YTN; PAM sequence: TTA
  source 1..20: mol_type = other DNA
cattgtagattaattacatt

SEQ ID NO: 11684 - DNA, 20 bp, synthetic construct
  misc_feature 1..20: note = Description of Artificial Sequence: Synthetic oligonucleotide
  misc_feature 1..20: note = Target: ANGPTL3; (-) strand; PAM type: YTN; PAM sequence: TTT
  source 1..20: mol_type = other DNA
acattgtagattaattacat

SEQ ID NO: 11685 - DNA, 20 bp, synthetic construct
  misc_feature 1..20: note = Description of Artificial Sequence: Synthetic oligonucleotide
  misc_feature 1..20: note = Target: ANGPTL3; (-) strand; PAM type: YTN; PAM sequence: TTC
  source 1..20: mol_type = other DNA
accagatgtttacattgtag

SEQ ID NO: 11686 - DNA, 20 bp, synthetic construct
  misc_feature 1..20: note = Description of Artificial Sequence: Synthetic oligonucleotide
  misc_feature 1..20: note = Target: ANGPTL3; (-) strand; PAM type: YTN; PAM sequence: CTT
  source 1..20: mol_type = other DNA
caccagatgtttacattgta

SEQ ID NO: 11687 - DNA, 20 bp, synthetic construct
  misc_feature 1..20: note = Description of Artificial Sequence: Synthetic oligonucleotide
  misc_feature 1..20: note = Target: ANGPTL3; (-) strand; PAM type: YTN; PAM sequence: CTG
  source 1..20: mol_type = other DNA
tcacttcaccagatgtttac

SEQ ID NO: 11688 - DNA, 20 bp, synthetic construct
  misc_feature 1..20: note = Description of Artificial Sequence: Synthetic oligonucleotide
  misc_feature 1..20: note = Target: ANGPTL3; (-) strand; PAM type: YTN; PAM sequence: CTC
  source 1..20: mol_type = other DNA
tgtcacttcaccagatgttt

SEQ ID NO: 11689 - DNA, 20 bp, synthetic construct
  misc_feature 1..20: note = Description of Artificial Sequence: Synthetic oligonucleotide
  misc_feature 1..20: note = Target: ANGPTL3; (-) strand; PAM type: YTN; PAM sequence: TTC
  source 1..20: mol_type = other DNA
cctctgtcacttcaccagat

SEQ ID NO: 11690 - DNA, 20 bp, synthetic construct
  misc_feature 1..20: note = Description of Artificial Sequence: Synthetic oligonucleotide
  misc_feature 1..20: note = Target: ANGPTL3; (-) strand; PAM type: YTN; PAM sequence: CTT
  source 1..20: mol_type = other DNA
ccctctgtcacttcaccaga

SEQ ID NO: 11691 - DNA, 20 bp, synthetic construct
  misc_feature 1..20: note = Description of Artificial Sequence: Synthetic oligonucleotide
  misc_feature 1..20: note = Target: ANGPTL3; (-) strand; PAM type: YTN; PAM sequence: CTA
  source 1..20: mol_type = other DNA
aacaagtgcttccctctgtc

SEQ ID NO: 11692 - DNA, 20 bp, synthetic construct
  misc_feature 1..20: note = Description of Artificial Sequence: Synthetic oligonucleotide
  misc_feature 1..20: note = Target: ANGPTL3; (-) strand; PAM type: YTN; PAM sequence: TTC
  source 1..20: mol_type = other DNA
taaacaagtgcttccctctg

SEQ ID NO: 11693 - DNA, 20 bp, synthetic construct
  misc_feature 1..20: note = Description of Artificial Sequence: Synthetic oligonucleotide
  misc_feature 1..20: note = Target: ANGPTL3; (-) strand; PAM type: YTN; PAM sequence: TTT
  source 1..20: mol_type = other DNA
ctaaacaagtgcttccctct

SEQ ID NO: 11694 - DNA, 20 bp, synthetic construct
  misc_feature 1..20: note = Description of Artificial Sequence: Synthetic oligonucleotide
  misc_feature 1..20: note = Target: ANGPTL3; (-) strand; PAM type: YTN; PAM sequence: TTT
  source 1..20: mol_type = other DNA
tctaaacaagtgcttccctc

SEQ ID NO: 11695 - DNA, 20 bp, synthetic construct
  misc_feature 1..20: note = Description of Artificial Sequence: Synthetic oligonucleotide
  misc_feature 1..20: note = Target: ANGPTL3; (-) strand; PAM type: YTN; PAM sequence: TTT
  source 1..20: mol_type = other DNA
ttctaaacaagtgcttccct

SEQ ID NO: 11696 - DNA, 20 bp, synthetic construct
  misc_feature 1..20: note = Description of Artificial Sequence: Synthetic oligonucleotide
  misc_feature 1..20: note = Target: ANGPTL3; (-) strand; PAM type: YTN; PAM sequence: TTT
  source 1..20: mol_type = other DNA
tttctaaacaagtgcttccc

SEQ ID NO: 11697 - DNA, 20 bp, synthetic construct
  misc_feature 1..20: note = Description of Artificial Sequence: Synthetic oligonucleotide
  misc_feature 1..20: note = Target: ANGPTL3; (-) strand; PAM type: YTN; PAM sequence: CTT
  source 1..20: mol_type = other DNA
ttttctaaacaagtgcttcc

SEQ ID NO: 11698 - DNA, 20 bp, synthetic construct
  misc_feature 1..20: note = Description of Artificial Sequence: Synthetic oligonucleotide
  misc_feature 1..20: note = Target: ANGPTL3; (-) strand; PAM type: YTN; PAM sequence: CTG
  source 1..20: mol_type = other DNA
acatagcttttttctaaaca

SEQ ID NO: 11699 - DNA, 20 bp, synthetic construct
  misc_feature 1..20: note = Description of Artificial Sequence: Synthetic oligonucleotide
  misc_feature 1..20: note = Target: ANGPTL3; (-) strand; PAM type: YTN; PAM sequence: TTC
  source 1..20: mol_type = other DNA
tgacatagcttttttctaaa

SEQ ID NO: 11700 - DNA, 20 bp, synthetic construct
  misc_feature 1..20: note = Description of Artificial Sequence: Synthetic oligonucleotide
  misc_feature 1..20: note = Target: ANGPTL3; (-) strand; PAM type: YTN; PAM sequence: TTA
  source 1..20: mol_type = other DNA
gaatacatggattctgacat

SEQ ID NO: 11701 - DNA, 20 bp, synthetic construct
  misc_feature 1..20: note = Description of Artificial Sequence: Synthetic oligonucleotide
  misc_feature 1..20: note = Target: ANGPTL3; (-) strand; PAM type: YTN; PAM sequence: CTG
  source 1..20: mol_type = other DNA
catattagaatacatggatt

SEQ ID NO: 11702 - DNA, 20 bp, synthetic construct
  misc_feature 1..20: note = Description of Artificial Sequence: Synthetic oligonucleotide
  misc_feature 1..20: note = Target: ANGPTL3; (-) strand; PAM type: YTN; PAM sequence: TTG
  source 1..20: mol_type = other DNA
tactgcatattagaatacat

SEQ ID NO: 11703 - DNA, 20 bp, synthetic construct
  misc_feature 1..20: note = Description of Artificial Sequence: Synthetic oligonucleotide
  misc_feature 1..20: note = Target: ANGPTL3; (-) strand; PAM type: YTN; PAM sequence: CTA
  source 1..20: mol_type = other DNA
ttgtactgcatattagaata

SEQ ID NO: 11704 - DNA, 20 bp, synthetic construct
  misc_feature 1..20: note = Description of Artificial Sequence: Synthetic oligonucleotide
  misc_feature 1..20: note = Target: ANGPTL3; (-) strand; PAM type: YTN; PAM sequence: TTA
  source 1..20: mol_type = other DNA
aactattgtactgcatatta

SEQ ID NO: 11705 - DNA, 20 bp, synthetic construct
  misc_feature 1..20: note = Description of Artificial Sequence: Synthetic oligonucleotide
  misc_feature 1..20: note = Target: ANGPTL3; (-) strand; PAM type: YTN; PAM sequence: TTT
  source 1..20: mol_type = other DNA
aaactattgtactgcatatt

SEQ ID NO: 11706 - DNA, 20 bp, synthetic construct
  misc_feature 1..20: note = Description of Artificial Sequence: Synthetic oligonucleotide
  misc_feature 1..20: note = Target: ANGPTL3; (-) strand; PAM type: YTN; PAM sequence: TTT
  source 1..20: mol_type = other DNA
taaactattgtactgcatat

SEQ ID NO: 11707 - DNA, 20 bp, synthetic construct
  misc_feature 1..20: note = Description of Artificial Sequence: Synthetic oligonucleotide
  misc_feature 1..20: note = Target: ANGPTL3; (-) strand; PAM type: YTN; PAM sequence: TTT
  source 1..20: mol_type = other DNA
ttaaactattgtactgcata

SEQ ID NO: 11708 - DNA, 20 bp, synthetic construct
  misc_feature 1..20: note = Description of Artificial Sequence: Synthetic oligonucleotide
  misc_feature 1..20: note = Target: ANGPTL3; (-) strand; PAM type: YTN; PAM sequence: TTA
  source 1..20: mol_type = other DNA
atatttttaaactattgtac

SEQ ID NO: 11709 - DNA, 20 bp, synthetic construct
  misc_feature 1..20: note = Description of Artificial Sequence: Synthetic oligonucleotide
  misc_feature 1..20: note = Target: ANGPTL3; (-) strand; PAM type: YTN; PAM sequence: TTA
  source 1..20: mol_type = other DNA
ttaatatttttaaactattg

SEQ ID NO: 11710 - DNA, 20 bp, synthetic construct
  misc_feature 1..20: note = Description of Artificial Sequence: Synthetic oligonucleotide
  misc_feature 1..20: note = Target: ANGPTL3; (-) strand; PAM type: YTN; PAM sequence: TTG
  source 1..20: mol_type = other DNA
agagtattattaatattttt

SEQ ID NO: 11711 - DNA, 20 bp, synthetic construct
  misc_feature 1..20: note = Description of Artificial Sequence: Synthetic oligonucleotide
  misc_feature 1..20: note = Target: ANGPTL3; (-) strand; PAM type: YTN; PAM sequence: TTT
  source 1..20: mol_type = other DNA
gagagtattattaatatttt

SEQ ID NO: 11712 - DNA, 20 bp, synthetic construct
  misc_feature 1..20: note = Description of Artificial Sequence: Synthetic oligonucleotide
  misc_feature 1..20: note = Target: ANGPTL3; (-) strand; PAM type: YTN; PAM sequence: CTG
  source 1..20: mol_type = other DNA
tttgagagtattattaatat

SEQ ID NO: 11713 - DNA, 20 bp, synthetic construct
  misc_feature 1..20: note = Description of Artificial Sequence: Synthetic oligonucleotide
  misc_feature 1..20: note = Target: ANGPTL3; (-) strand; PAM type: YTN; PAM sequence: TTG
  source 1..20: mol_type = other DNA
aatagctgtttgagagtatt

SEQ ID NO: 11714 - DNA, 20 bp, synthetic construct
  misc_feature 1..20: note = Description of Artificial Sequence: Synthetic oligonucleotide
  misc_feature 1..20: note = Target: ANGPTL3; (-) strand; PAM type: YTN; PAM sequence: CTT
  source 1..20: mol_type = other DNA
gaatagctgtttgagagtat

SEQ ID NO: 11715 - DNA, 20 bp, synthetic construct
  misc_feature 1..20: note = Description of Artificial Sequence: Synthetic oligonucleotide
  misc_feature 1..20: note = Target: ANGPTL3; (-) strand; PAM type: YTN; PAM sequence: CTC
  source 1..20: mol_type = other DNA
ttgaatagctgtttgagagt

SEQ ID NO: 11716 - DNA, 20 bp, synthetic construct
  misc_feature 1..20: note = Description of Artificial Sequence: Synthetic oligonucleotide
  misc_feature 1..20: note = Target: ANGPTL3; (-) strand; PAM type: YTN; PAM sequence: TTG
  source 1..20: mol_type = other DNA
aatcctcttgaatagctgtt

SEQ ID NO: 11717 - DNA, 20 bp, synthetic construct
  misc_feature 1..20: note = Description of Artificial Sequence: Synthetic oligonucleotide
  misc_feature 1..20: note = Target: ANGPTL3; (-) strand; PAM type: YTN; PAM sequence: TTT
  source 1..20: mol_type = other DNA
gaatcctcttgaatagctgt

SEQ ID NO: 11718 - DNA, 20 bp, synthetic construct
  misc_feature 1..20: note = Description of Artificial Sequence: Synthetic oligonucleotide
  misc_feature 1..20: note = Target: ANGPTL3; (-) strand; PAM type: YTN; PAM sequence: TTT
  source 1..20: mol_type = other DNA
tgaatcctcttgaatagctg

SEQ ID NO: 11719 - DNA, 20 bp, synthetic construct
  misc_feature 1..20: note = Description of Artificial Sequence: Synthetic oligonucleotide
  misc_feature 1..20: note = Target: ANGPTL3; (-) strand; PAM type: YTN; PAM sequence: TTT
  source 1..20: mol_type = other DNA
ttgaatcctcttgaatagct

SEQ ID NO: 11720 - DNA, 20 bp, synthetic construct
  misc_feature 1..20: note = Description of Artificial Sequence: Synthetic oligonucleotide
  misc_feature 1..20: note = Target: ANGPTL3; (-) strand; PAM type: YTN; PAM sequence: TTT
  source 1..20: mol_type = other DNA
tttgaatcctcttgaatagc

SEQ ID NO: 11721 - DNA, 20 bp, synthetic construct
  misc_feature 1..20: note = Description of Artificial Sequence: Synthetic oligonucleotide
  misc_feature 1..20: note = Target: ANGPTL3; (-) strand; PAM type: YTN; PAM sequence: TTA
  source 1..20: mol_type = other DNA
tgttttttgaatcctcttga

SEQ ID NO: 11722 - DNA, 20 bp, synthetic construct
  misc_feature 1..20: note = Description of Artificial Sequence: Synthetic oligonucleotide
  misc_feature 1..20: note = Target: ANGPTL3; (-) strand; PAM type: YTN; PAM sequence: TTA
  source 1..20: mol_type = other DNA
tattatgttttttgaatcct

SEQ ID NO: 11723 - DNA, 20 bp, synthetic construct
  misc_feature 1..20: note = Description of Artificial Sequence: Synthetic oligonucleotide
  misc_feature 1..20: note = Target: ANGPTL3; (-) strand; PAM type: YTN; PAM sequence: TTT
  source 1..20: mol_type = other DNA
atattatgttttttgaatcc

SEQ ID NO: 11724 - DNA, 20 bp, synthetic construct
  misc_feature 1..20: note = Description of Artificial Sequence: Synthetic oligonucleotide
  misc_feature 1..20: note = Target: ANGPTL3; (-) strand; PAM type: YTN; PAM sequence: CTG
  source 1..20: mol_type = other DNA
agtttatattatgttttttg

SEQ ID NO: 11725 - DNA, 20 bp, synthetic construct
  misc_feature 1..20: note = Description of Artificial Sequence: Synthetic oligonucleotide
  misc_feature 1..20: note = Target: ANGPTL3; (-) strand; PAM type: YTN; PAM sequence: CTC
  source 1..20: mol_type = other DNA
tgagtttatattatgttttt

SEQ ID NO: 11726 - DNA, 20 bp, synthetic construct
  misc_feature 1..20: note = Description of Artificial Sequence: Synthetic oligonucleotide
  misc_feature 1..20: note = Target: ANGPTL3; (-) strand; PAM type: YTN; PAM sequence: TTC
  source 1..20: mol_type = other DNA
tctgagtttatattatgttt

SEQ ID NO: 11727 - DNA, 20 bp, synthetic construct
  misc_feature 1..20: note = Description of Artificial Sequence: Synthetic oligonucleotide
  misc_feature 1..20: note = Target: ANGPTL3; (-) strand; PAM type: YTN; PAM sequence: TTT
  source 1..20: mol_type = other DNA
ctctgagtttatattatgtt

SEQ ID NO: 11728 - DNA, 20 bp, synthetic construct
  misc_feature 1..20: note = Description of Artificial Sequence: Synthetic oligonucleotide
  misc_feature 1..20: note = Target: ANGPTL3; (-) strand; PAM type: YTN; PAM sequence: TTA
  source 1..20: mol_type = other DNA
ccagtttctctgagtttata

SEQ ID NO: 11729 - DNA, 20 bp, synthetic construct
  misc_feature 1..20: note = Description of Artificial Sequence: Synthetic oligonucleotide
  misc_feature 1..20: note = Target: ANGPTL3; (-) strand; PAM type: YTN; PAM sequence: TTT
  source 1..20: mol_type = other DNA
accagtttctctgagtttat

SEQ ID NO: 11730 - DNA, 20 bp, synthetic construct
  misc_feature 1..20: note = Description of Artificial Sequence: Synthetic oligonucleotide
  misc_feature 1..20: note = Target: ANGPTL3; (-) strand; PAM type: YTN; PAM sequence: TTG
  source 1..20: mol_type = other DNA
tttaccagtttctctgagtt

SEQ ID NO: 11731 - DNA, 20 bp, synthetic construct
  misc_feature 1..20: note = Description of Artificial Sequence: Synthetic oligonucleotide
  misc_feature 1..20: note = Target: ANGPTL3; (-) strand; PAM type: YTN; PAM sequence: TTT
  source 1..20: mol_type = other DNA
gtttaccagtttctctgagt

SEQ ID NO: 11732 - DNA, 20 bp, synthetic construct
  misc_feature 1..20: note = Description of Artificial Sequence: Synthetic oligonucleotide
  misc_feature 1..20: note = Target: ANGPTL3; (-) strand; PAM type: YTN; PAM sequence: TTT
  source 1..20: mol_type = other DNA
tgtttaccagtttctctgag

SEQ ID NO: 11733 - DNA, 20 bp, synthetic construct
  misc_feature 1..20: note = Description of Artificial Sequence: Synthetic oligonucleotide
  misc_feature 1..20: note = Target: ANGPTL3; (-) strand; PAM type: YTN; PAM sequence: TTG
  source 1..20: mol_type = other DNA
aaaatgattttgtttaccag

SEQ ID NO: 11734 - DNA, 20 bp, synthetic construct
  misc_feature 1..20: note = Description of Artificial Sequence: Synthetic oligonucleotide
  misc_feature 1..20: note = Target: ANGPTL3; (-) strand; PAM type: YTN; PAM sequence: CTT
  source 1..20: mol_type = other DNA
gaaaatgattttgtttacca

SEQ ID NO: 11735 - DNA, 20 bp, synthetic construct
  misc_feature 1..20: note = Description of Artificial Sequence: Synthetic oligonucleotide
  misc_feature 1..20: note = Target: ANGPTL3; (-) strand; PAM type: YTN; PAM sequence: CTC
  source 1..20: mol_type = other DNA
ttgaaaatgattttgtttac

SEQ ID NO: 11736 - DNA, 20 bp, synthetic construct
  misc_feature 1..20: note = Description of Artificial Sequence: Synthetic oligonucleotide
  misc_feature 1..20: note = Target: ANGPTL3; (-) strand; PAM type: YTN; PAM sequence: TTA
  source 1..20: mol_type = other DNA
tatctcttgaaaatgatttt

SEQ ID NO: 11737 - DNA, 20 bp, synthetic construct
  misc_feature 1..20: note = Description of Artificial Sequence: Synthetic oligonucleotide
  misc_feature 1..20: note = Target: ANGPTL3; (-) strand; PAM type: YTN; PAM sequence: TTT
  source 1..20: mol_type = other DNA
atatctcttgaaaatgattt

SEQ ID NO: 11738 - DNA, 20 bp, synthetic construct
  misc_feature 1..20: note = Description of Artificial Sequence: Synthetic oligonucleotide
  misc_feature 1..20: note = Target: ANGPTL3; (-) strand; PAM type: YTN; PAM sequence: TTT
  source 1..20: mol_type = other DNA
tatatctcttgaaaatgatt

SEQ ID NO: 11739 - DNA, 20 bp, synthetic construct
  misc_feature 1..20: note = Description of Artificial Sequence: Synthetic oligonucleotide
  misc_feature 1..20: note = Target: ANGPTL3; (-) strand; PAM type: YTN; PAM sequence: TTG
  source 1..20: mol_type = other DNA
ttttatatctcttgaaaatg

SEQ ID NO: 11740 - DNA, 20 bp, synthetic construct
  misc_feature 1..20: note = Description of Artificial Sequence: Synthetic oligonucleotide
  misc_feature 1..20: note = Target: ANGPTL3; (-) strand; PAM type: YTN; PAM sequence: TTT
  source 1..20: mol_type = other DNA
gttttatatctcttgaaaat

SEQ ID NO: 11741 - DNA, 20 bp, synthetic construct
  misc_feature 1..20: note = Description of Artificial Sequence: Synthetic oligonucleotide
  misc_feature 1..20: note = Target: ANGPTL3; (-) strand; PAM type: YTN; PAM sequence: TTG
  source 1..20: mol_type = other DNA
gtaataatatttgttttata

SEQ ID NO: 11742 - DNA, 20 bp, synthetic construct
  misc_feature 1..20: note = Description of Artificial Sequence: Synthetic oligonucleotide
  misc_feature 1..20: note = Target: ANGPTL3; (-) strand; PAM type: YTN; PAM sequence: TTA
  source 1..20: mol_type = other DNA
gtggaaattggtaataatat

SEQ ID NO: 11743 - DNA, 20 bp, synthetic construct
  misc_feature 1..20: note = Description of Artificial Sequence: Synthetic oligonucleotide
  misc_feature 1..20: note = Target: ANGPTL3; (-) strand; PAM type: YTN; PAM sequence: TTT
  source 1..20: mol_type = other DNA
agtggaaattggtaataata

SEQ ID NO: 11744 - DNA, 20 bp, synthetic construct
  misc_feature 1..20: note = Description of Artificial Sequence: Synthetic oligonucleotide
  misc_feature 1..20: note = Target: ANGPTL3; (-) strand; PAM type: YTN; PAM sequence: TTG
  source 1..20: mol_type = other DNA
tttagtggaaattggtaata

SEQ ID NO: 11745 - DNA, 20 bp, synthetic construct
  misc_feature 1..20: note = Description of Artificial Sequence: Synthetic oligonucleotide
  misc_feature 1..20: note = Target: ANGPTL3; (-) strand; PAM type: YTN; PAM sequence: TTT
  source 1..20: mol_type = other DNA
gtttagtggaaattggtaat

SEQ ID NO: 11746 - DNA, 20 bp, synthetic construct
  misc_feature 1..20: note = Description of Artificial Sequence: Synthetic oligonucleotide
  misc_feature 1..20: note = Target: ANGPTL3; (-) strand; PAM type: YTN; PAM sequence: TTA
  source 1..20: mol_type = other DNA
tgtttgtttagtggaaattg

SEQ ID NO: 11747 - DNA, 20 bp, synthetic construct
  misc_feature 1..20: note = Description of Artificial Sequence: Synthetic oligonucleotide
  misc_feature 1..20: note = Target: ANGPTL3; (-) strand; PAM type: YTN; PAM sequence: CTA
  source 1..20: mol_type = other DNA
acattatgtttgtttagtgg

SEQ ID NO: 11748 - DNA, 20 bp, synthetic construct
  misc_feature 1..20: note = Description of Artificial Sequence: Synthetic oligonucleotide
  misc_feature 1..20: note = Target: ANGPTL3; (-) strand; PAM type: YTN; PAM sequence: CTA
  source 1..20: mol_type = other DNA
ctaacattatgtttgtttag

SEQ ID NO: 11749 - DNA, 20 bp, synthetic construct
  misc_feature 1..20: note = Description of Artificial Sequence: Synthetic oligonucleotide
  misc_feature 1..20: note = Target: ANGPTL3; (-) strand; PAM type: YTN; PAM sequence: TTA
  source 1..20: mol_type = other DNA
gcagcactactaacattatg

SEQ ID NO: 11750 - DNA, 20 bp, synthetic construct
  misc_feature 1..20: note = Description of Artificial Sequence: Synthetic oligonucleotide
  misc_feature 1..20: note = Target: ANGPTL3; (-) strand; PAM type: YTN; PAM sequence: TTT
  source 1..20: mol_type = other DNA
agcagcactactaacattat

SEQ ID NO: 11751 - DNA, 20 bp, synthetic construct
  misc_feature 1..20: note = Description of Artificial Sequence: Synthetic oligonucleotide
  misc_feature 1..20: note = Target: ANGPTL3; (-) strand; PAM type: YTN; PAM sequence: TTT
  source 1..20: mol_type = other DNA
tagcagcactactaacatta

SEQ ID NO: 11752 - DNA, 20 bp, synthetic construct
  misc_feature 1..20: note = Description of Artificial Sequence: Synthetic oligonucleotide
  misc_feature 1..20: note = Target: ANGPTL3; (-) strand; PAM type: YTN; PAM sequence: CTT
  source 1..20: mol_type = other DNA
ttagcagcactactaacatt

SEQ ID NO: 11753 - DNA, 20 bp, synthetic construct
  misc_feature 1..20: note = Description of Artificial Sequence: Synthetic oligonucleotide
  misc_feature 1..20: note = Target: ANGPTL3; (-) strand; PAM type: YTN; PAM sequence: TTG
  source 1..20: mol_type = other DNA
ataaaaaaccttttagcagc

SEQ ID NO: 11754 - DNA, 20 bp, synthetic construct
  misc_feature 1..20: note = Description of Artificial Sequence: Synthetic oligonucleotide
  misc_feature 1..20: note = Target: ANGPTL3; (-) strand; PAM type: YTN; PAM sequence: TTA
  source 1..20: mol_type = other DNA
gaataataacatcataagaa

SEQ ID NO: 11755 - DNA, 20 bp, synthetic construct
  misc_feature 1..20: note = Description of Artificial Sequence: Synthetic oligonucleotide
  misc_feature 1..20: note = Target: ANGPTL3; (-) strand; PAM type: YTN; PAM sequence: TTT
  source 1..20: mol_type = other DNA
agaataataacatcataaga

SEQ ID NO: 11756 - DNA, 20 bp, synthetic construct
  misc_feature 1..20: note = Description of Artificial Sequence: Synthetic oligonucleotide
  misc_feature 1..20: note = Target: ANGPTL3; (-) strand; PAM type: YTN; PAM sequence: TTG
  source 1..20: mol_type = other DNA
aaaagaatttagaataataa

SEQ ID NO: 11757 - DNA, 20 bp, synthetic construct
  misc_feature 1..20: note = Description of Artificial Sequence: Synthetic oligonucleotide
  misc_feature 1..20: note = Target: ANGPTL3; (-) strand; PAM type: YTN; PAM sequence: TTA
  source 1..20: mol_type = other DNA
atcatagtaaaagatataat

SEQ ID NO: 11758 - DNA, 20 bp, synthetic construct
  misc_feature 1..20: note = Description of Artificial Sequence: Synthetic oligonucleotide
  misc_feature 1..20: note = Target: ANGPTL3; (-) strand; PAM type: YTN; PAM sequence: TTT
  source 1..20: mol_type = other DNA
aatcatagtaaaagatataa

SEQ ID NO: 11759 - DNA, 20 bp, synthetic construct
  misc_feature 1..20: note = Description of Artificial Sequence: Synthetic oligonucleotide
  misc_feature 1..20: note = Target: ANGPTL3; (-) strand; PAM type: YTN; PAM sequence: TTC
  source 1..20: mol_type = other DNA
atttaatcatagtaaaagat

SEQ ID NO: 11760 - DNA, 20 bp, synthetic construct
  misc_feature 1..20: note = Description of Artificial Sequence: Synthetic oligonucleotide
  misc_feature 1..20: note = Target: ANGPTL3; (-) strand; PAM type: YTN; PAM sequence: TTG
  source 1..20: mol_type = other DNA
gggagcaggttcatttaatc

SEQ ID NO: 11761 - DNA, 20 bp, synthetic construct
  misc_feature 1..20: note = Description of Artificial Sequence: Synthetic oligonucleotide
  misc_feature 1..20: note = Target: ANGPTL3; (-) strand; PAM type: YTN; PAM sequence: TTT
  source 1..20: mol_type = other DNA
ggggagcaggttcatttaat

SEQ ID NO: 11762 - DNA, 20 bp, synthetic construct
  misc_feature 1..20: note = Description of Artificial Sequence: Synthetic oligonucleotide
  misc_feature 1..20: note = Target: ANGPTL3; (-) strand; PAM type: YTN; PAM sequence: CTT
  source 1..20: mol_type = other DNA
tggggagcaggttcatttaa

SEQ ID NO: 11763 - DNA, 20 bp, synthetic construct
  misc_feature 1..20: note = Description of Artificial Sequence: Synthetic oligonucleotide
  misc_feature 1..20: note = Target: ANGPTL3; (-) strand; PAM type: YTN; PAM sequence: TTG
  source 1..20: mol_type = other DNA
ctttggggagcaggttcatt

SEQ ID NO: 11764 - DNA, 20 bp, synthetic construct
  misc_feature 1..20: note = Description of Artificial Sequence: Synthetic oligonucleotide
  misc_feature 1..20: note = Target: ANGPTL3; (-) strand; PAM type: YTN; PAM sequence: TTT
  source 1..20: mol_type = other DNA
gctttggggagcaggttcat

SEQ ID NO: 11765 - DNA, 20 bp, synthetic construct
  misc_feature 1..20: note = Description of Artificial Sequence: Synthetic oligonucleotide
  misc_feature 1..20: note = Target: ANGPTL3; (-) strand; PAM type: YTN; PAM sequence: TTT
  source 1..20: mol_type = other DNA
tgctttggggagcaggttca

SEQ ID NO: 11766 - DNA, 20 bp, synthetic construct
  misc_feature 1..20: note = Description of Artificial Sequence: Synthetic oligonucleotide
  misc_feature 1..20: note = Target: ANGPTL3; (-) strand; PAM type: YTN; PAM sequence: CTA
  source 1..20: mol_type = other DNA
tagtaacattttgctttggg

SEQ ID NO: 11767 - DNA, 20 bp, synthetic construct
  misc_feature 1..20: note = Description of Artificial Sequence: Synthetic oligonucleotide
  misc_feature 1..20: note = Target: ANGPTL3; (-) strand; PAM type: YTN; PAM sequence: TTA
  source 1..20: mol_type = other DNA
ctatagtaacattttgcttt

SEQ ID NO: 11768 - DNA, 20 bp, synthetic construct
  misc_feature 1..20: note = Description of Artificial Sequence: Synthetic oligonucleotide
  misc_feature 1..20: note = Target: ANGPTL3; (-) strand; PAM type: YTN; PAM sequence: TTA
  source 1..20: mol_type = other DNA
gacacaatgtatattactat

SEQ ID NO: 11769 - DNA, 20 bp, synthetic construct
  misc_feature 1..20: note = Description of Artificial Sequence: Synthetic oligonucleotide
  misc_feature 1..20: note = Target: ANGPTL3; (-) strand; PAM type: YTN; PAM sequence: TTT
  source 1..20: mol_type = other DNA
agacacaatgtatattacta

SEQ ID NO: 11770 - DNA, 20 bp, synthetic construct
  misc_feature 1..20: note = Description of Artificial Sequence: Synthetic oligonucleotide
  misc_feature 1..20: note = Target: ANGPTL3; (-) strand; PAM type: YTN; PAM sequence: TTT
  source 1..20: mol_type = other DNA
tagacacaatgtatattact

SEQ ID NO: 11771 - DNA, 20 bp, synthetic construct
  misc_feature 1..20: note = Description of Artificial Sequence: Synthetic oligonucleotide
  misc_feature 1..20: note = Target: ANGPTL3; (-) strand; PAM type: YTN; PAM sequence: TTT
  source 1..20: mol_type = other DNA
ttagacacaatgtatattac

SEQ ID NO: 11772 - DNA, 20 bp, synthetic construct
  misc_feature 1..20: note = Description of Artificial Sequence: Synthetic oligonucleotide
  misc_feature 1..20: note = Target: ANGPTL3; (-) strand; PAM type: YTN; PAM sequence: TTA
  source 1..20: mol_type = other DNA
tttttagacacaatgtatat

SEQ ID NO: 11773 - DNA, 20 bp, synthetic construct
  misc_feature 1..20: note = Description of Artificial Sequence: Synthetic oligonucleotide
  misc_feature 1..20: note = Target: ANGPTL3; (-) strand; PAM type: YTN; PAM sequence: TTT
  source 1..20: mol_type = other DNA
atttttagacacaatgtata

SEQ ID NO: 11774 - DNA, 20 bp, synthetic construct
  misc_feature 1..20: note = Description of Artificial Sequence: Synthetic oligonucleotide
  misc_feature 1..20: note = Target: ANGPTL3; (-) strand; PAM type: YTN; PAM sequence: TTT
  source 1..20: mol_type = other DNA
tatttttagacacaatgtat

SEQ ID NO: 11775 - DNA, 20 bp, synthetic construct
  misc_feature 1..20: note = Description of Artificial Sequence: Synthetic oligonucleotide
  misc_feature 1..20: note = Target: ANGPTL3; (-) strand; PAM type: YTN; PAM sequence: TTT
  source 1..20: mol_type = other DNA
ttatttttagacacaatgta

SEQ ID NO: 11776 - DNA, 20 bp, synthetic construct
  misc_feature 1..20: note = Description of Artificial Sequence: Synthetic oligonucleotide
  misc_feature 1..20: note = Target: ANGPTL3; (-) strand; PAM type: YTN; PAM sequence: TTC
  source 1..20: mol_type = other DNA
acacatttttatttttagac

SEQ ID NO: 11777 - DNA, 20 bp, synthetic construct
  misc_feature 1..20: note = Description of Artificial Sequence: Synthetic oligonucleotide
  misc_feature 1..20: note = Target: ANGPTL3; (-) strand; PAM type: YTN; PAM sequence: CTT
  source 1..20: mol_type = other DNA
cacacatttttatttttaga

SEQ ID NO: 11778 - DNA, 20 bp, synthetic construct
  misc_feature 1..20: note = Description of Artificial Sequence: Synthetic oligonucleotide
  misc_feature 1..20: note = Target: ANGPTL3; (-) strand; PAM type: YTN; PAM sequence: TTC
  source 1..20: mol_type = other DNA
ttcacacatttttattttta

SEQ ID NO: 11779 - DNA, 20 bp, synthetic construct
  misc_feature 1..20: note = Description of Artificial Sequence: Synthetic oligonucleotide
  misc_feature 1..20: note = Target: ANGPTL3; (-) strand; PAM type: YTN; PAM sequence: TTT
  source 1..20: mol_type = other DNA
cttcacacatttttattttt

SEQ ID NO: 11780 - DNA, 20 bp, synthetic construct
  misc_feature 1..20: note = Description of Artificial Sequence: Synthetic oligonucleotide
  misc_feature 1..20: note = Target: ANGPTL3; (-) strand; PAM type: YTN; PAM sequence: TTG
  source 1..20: mol_type = other DNA
gtttcttcacacatttttat

SEQ ID NO: 11781 - DNA, 20 bp, synthetic construct
  misc_feature 1..20: note = Description of Artificial Sequence: Synthetic oligonucleotide
  misc_feature 1..20: note = Target: ANGPTL3; (-) strand; PAM type: YTN; PAM sequence: TTT
  source 1..20: mol_type = other DNA
ggtttcttcacacattttta

SEQ ID NO: 11782 - DNA, 20 bp, synthetic construct
  misc_feature 1..20: note = Description of Artificial Sequence: Synthetic oligonucleotide
  misc_feature 1..20: note = Target: ANGPTL3; (-) strand; PAM type: YTN; PAM sequence: TTT
  source 1..20: mol_type = other DNA
tggtttcttcacacattttt

SEQ ID NO: 11783 - DNA, 20 bp, synthetic construct
  misc_feature 1..20: note = Description of Artificial Sequence: Synthetic oligonucleotide
  misc_feature 1..20: note = Target: ANGPTL3; (-) strand; PAM type: YTN; PAM sequence: TTG
  source 1..20: mol_type = other DNA
ttttggtttcttcacacatt

SEQ ID NO: 11784 - DNA, 20 bp, synthetic construct
  misc_feature 1..20: note = Description of Artificial Sequence: Synthetic oligonucleotide
  misc_feature 1..20: note = Target: ANGPTL3; (-) strand; PAM type: YTN; PAM sequence: TTC
  source 1..20: mol_type = other DNA
attgttttggtttcttcaca

SEQ ID NO: 11785 - DNA, 20 bp, synthetic construct
  misc_feature 1..20: note = Description of Artificial Sequence: Synthetic oligonucleotide
  misc_feature 1..20: note = Target: ANGPTL3; (-) strand; PAM type: YTN; PAM sequence: CTC
  source 1..20: mol_type = other DNA
agaaattcattgttttggtt

SEQ ID NO: 11786 - DNA, 20 bp, synthetic construct
  misc_feature 1..20: note = Description of Artificial Sequence: Synthetic oligonucleotide
  misc_feature 1..20: note = Target: ANGPTL3; (-) strand; PAM type: YTN; PAM sequence: TTC
  source 1..20: mol_type = other DNA
caactcagaaattcattgtt

SEQ ID NO: 11787 - DNA, 20 bp, synthetic construct
  misc_feature 1..20: note = Description of Artificial Sequence: Synthetic oligonucleotide
  misc_feature 1..20: note = Target: ANGPTL3; (-) strand; PAM type: YTN; PAM sequence: CTT
  source 1..20: mol_type = other DNA
ccaactcagaaattcattgt

SEQ ID NO: 11788 - DNA, 20 bp, synthetic construct
  misc_feature 1..20: note = Description of Artificial Sequence: Synthetic oligonucleotide
  misc_feature 1..20: note = Target: ANGPTL3; (-) strand; PAM type: YTN; PAM sequence: TTC
  source 1..20: mol_type = other DNA
ttccaactcagaaattcatt

SEQ ID NO: 11789 - DNA, 20 bp, synthetic construct
  misc_feature 1..20: note = Description of Artificial Sequence: Synthetic oligonucleotide
  misc_feature 1..20: note = Target: ANGPTL3; (-) strand; PAM type: YTN; PAM sequence: CTT
  source 1..20: mol_type = other DNA
cttccaactcagaaattcat

SEQ ID NO: 11790 - DNA, 20 bp, synthetic construct
  misc_feature 1..20: note = Description of Artificial Sequence: Synthetic oligonucleotide
  misc_feature 1..20: note = Target: ANGPTL3; (-) strand; PAM type: YTN; PAM sequence: CTC
  source 1..20: mol_type = other DNA
ttcttccaactcagaaattc

SEQ ID NO: 11791 - DNA, 20 bp, synthetic construct
  misc_feature 1..20: note = Description of Artificial Sequence: Synthetic oligonucleotide
  misc_feature 1..20: note = Target: ANGPTL3; (-) strand; PAM type: YTN; PAM sequence: CTA
  source 1..20: mol_type = other DNA
actcttcttccaactcagaa

SEQ ID NO: 11792 - DNA, 20 bp, synthetic construct
  misc_feature 1..20: note = Description of Artificial Sequence: Synthetic oligonucleotide
  misc_feature 1..20: note = Target: ANGPTL3; (-) strand; PAM type: YTN; PAM sequence: TTA
  source 1..20: mol_type = other DNA
aatgatctaactcttcttcc

SEQ ID NO: 11793 - DNA, 20 bp, synthetic construct
  misc_feature 1..20: note = Description of Artificial Sequence: Synthetic oligonucleotide
  misc_feature 1..20: note = Target: ANGPTL3; (-) strand; PAM type: YTN; PAM sequence: TTA
  source 1..20: mol_type = other DNA
aatatgagaaagttaaatga

SEQ ID NO: 11794 - DNA, 20 bp, synthetic construct
  misc_feature 1..20: note = Description of Artificial Sequence: Synthetic oligonucleotide
  misc_feature 1..20: note = Target: ANGPTL3; (-) strand; PAM type: YTN; PAM sequence: TTT
  source 1..20: mol_type = other DNA
aaatatgagaaagttaaatg

SEQ ID NO: 11795 - DNA, 20 bp, synthetic construct
  misc_feature 1..20: note = Description of Artificial Sequence: Synthetic oligonucleotide
  misc_feature 1..20: note = Target: ANGPTL3; (-) strand; PAM type: YTN; PAM sequence: TTA
  source 1..20: mol_type = other DNA
atttaaatatgagaaagtta

SEQ ID NO: 11796 - DNA, 20 bp, synthetic construct
  misc_feature 1..20: note = Description of Artificial Sequence: Synthetic oligonucleotide
  misc_feature 1..20: note = Target: ANGPTL3; (-) strand; PAM type: YTN; PAM sequence: TTT
  source 1..20: mol_type = other DNA
aatttaaatatgagaaagtt

SEQ ID NO: 11797 - DNA, 20 bp, synthetic construct
  misc_feature 1..20: note = Description of Artificial Sequence: Synthetic oligonucleotide
  misc_feature 1..20: note = Target: ANGPTL3; (-) strand; PAM type: YTN; PAM sequence: TTT
  source 1..20: mol_type = other DNA
taatttaaatatgagaaagt

SEQ ID NO: 11798 - DNA, 20 bp, synthetic construct
  misc_feature 1..20: note = Description of Artificial Sequence: Synthetic oligonucleotide
  misc_feature 1..20: note = Target: ANGPTL3; (-) strand; PAM type: YTN; PAM sequence: TTT
  source 1..20: mol_type = other DNA
ttaatttaaatatgagaaag

SEQ ID NO: 11799 - DNA, 20 bp, synthetic construct
  misc_feature 1..20: note = Description of Artificial Sequence: Synthetic oligonucleotide
  misc_feature 1..20: note = Target: ANGPTL3; (-) strand; PAM type: YTN; PAM sequence: TTT
  source 1..20: mol_type = other DNA
tttaatttaaatatgagaaa

SEQ ID NO: 11800 - DNA, 20 bp, synthetic construct
  misc_feature 1..20: note = Description of Artificial Sequence: Synthetic oligonucleotide
  misc_feature 1..20: note = Target: ANGPTL3; (-) strand; PAM type: YTN; PAM sequence: TTT
  source 1..20: mol_type = other DNA
ttttaatttaaatatgagaa

SEQ ID NO: 11801 - DNA, 20 bp, synthetic construct
  misc_feature 1..20: note = Description of Artificial Sequence: Synthetic oligonucleotide
  misc_feature 1..20: note = Target: ANGPTL3; (-) strand; PAM type: YTN; PAM sequence: TTG
  source 1..20: mol_type = other DNA
tttttttaatttaaatatga

SEQ ID NO: 11802 - DNA, 20 bp, synthetic construct
  misc_feature 1..20: note = Description of Artificial Sequence: Synthetic oligonucleotide
  misc_feature 1..20: note = Target: ANGPTL3; (-) strand; PAM type: YTN; PAM sequence: TTT
  source 1..20: mol_type = other DNA
gtttttttaatttaaatatg

SEQ ID NO: 11803 - DNA, 20 bp, synthetic construct
  misc_feature 1..20: note = Description of Artificial Sequence: Synthetic oligonucleotide
  misc_feature 1..20: note = Target: ANGPTL3; (-) strand; PAM type: YTN; PAM sequence: TTT
  source 1..20: mol_type = other DNA
tgtttttttaatttaaatat

SEQ ID NO: 11804 - DNA, 20 bp, synthetic construct
  misc_feature 1..20: note = Description of Artificial Sequence: Synthetic oligonucleotide
  misc_feature 1..20: note = Target: ANGPTL3; (-) strand; PAM type: YTN; PAM sequence: TTA
  source 1..20: mol_type = other DNA
gagttttgtttttttaattt

SEQ ID NO: 11805 - DNA, 20 bp, synthetic construct
  misc_feature 1..20: note = Description of Artificial Sequence: Synthetic oligonucleotide
  misc_feature 1..20: note = Target: ANGPTL3; (-) strand; PAM type: YTN; PAM sequence: TTT
  source 1..20: mol_type = other DNA
agagttttgtttttttaatt

SEQ ID NO: 11806 - DNA, 20 bp, synthetic construct
  misc_feature 1..20: note = Description of Artificial Sequence: Synthetic oligonucleotide
  misc_feature 1..20: note = Target: ANGPTL3; (-) strand; PAM type: YTN; PAM sequence: TTT
  source 1..20: mol_type = other DNA
tagagttttgtttttttaat

SEQ ID NO: 11807 - DNA, 20 bp, synthetic construct
  misc_feature 1..20: note = Description of Artificial Sequence: Synthetic oligonucleotide
  misc_feature 1..20: note = Target: ANGPTL3; (-) strand; PAM type: YTN; PAM sequence: TTT
  source 1..20: mol_type = other DNA
ttagagttttgtttttttaa

SEQ ID NO: 11808 - DNA, 20 bp, synthetic construct
  misc_feature 1..20: note = Description of Artificial Sequence: Synthetic oligonucleotide
  misc_feature 1..20: note = Target: ANGPTL3; (-) strand; PAM type: YTN; PAM sequence: TTA
  source 1..20: mol_type = other DNA
aatttttagagttttgtttt

SEQ ID NO: 11809 - DNA, 20 bp, synthetic construct
  misc_feature 1..20: note = Description of Artificial Sequence: Synthetic oligonucleotide
  misc_feature 1..20: note = Target: ANGPTL3; (-) strand; PAM type: YTN; PAM sequence: CTT
  source 1..20: mol_type = other DNA
aaatttttagagttttgttt

SEQ ID NO: 11810 - DNA, 20 bp, synthetic construct
  misc_feature 1..20: note = Description of Artificial Sequence: Synthetic oligonucleotide
  misc_feature 1..20: note = Target: ANGPTL3; (-) strand; PAM type: YTN; PAM sequence: TTA
  source 1..20: mol_type = other DNA
cttaaatttttagagttttg

SEQ ID NO: 11811 - DNA, 20 bp, synthetic construct
  misc_feature 1..20: note = Description of Artificial Sequence: Synthetic oligonucleotide
  misc_feature 1..20: note = Target: ANGPTL3; (-) strand; PAM type: YTN; PAM sequence: TTA
  source 1..20: mol_type = other DNA
aagttacttaaatttttaga

SEQ ID NO: 11812 - DNA, 20 bp, synthetic construct
  misc_feature 1..20: note = Description of Artificial Sequence: Synthetic oligonucleotide
  misc_feature 1..20: note = Target: ANGPTL3; (-) strand; PAM type: YTN; PAM sequence: CTT
  source 1..20: mol_type = other DNA
aaagttacttaaatttttag

SEQ ID NO: 11813 - DNA, 20 bp, synthetic construct
  misc_feature 1..20: note = Description of Artificial Sequence: Synthetic oligonucleotide
  misc_feature 1..20: note = Target: ANGPTL3; (-) strand; PAM type: YTN; PAM sequence: CTA
  source 1..20: mol_type = other DNA
tgtgatcttaaagttactta

SEQ ID NO: 11814 - DNA, 20 bp, synthetic construct
  misc_feature 1..20: note = Description of Artificial Sequence: Synthetic oligonucleotide
  misc_feature 1..20: note = Target: ANGPTL3; (-) strand; PAM type: YTN; PAM sequence: CTA
  source 1..20: mol_type = other DNA
agtaactatgtgatcttaaa

SEQ ID NO: 11815 - DNA, 20 bp, synthetic construct
  misc_feature 1..20: note = Description of Artificial Sequence: Synthetic oligonucleotide
  misc_feature 1..20: note = Target: ANGPTL3; (-) strand; PAM type: YTN; PAM sequence: CTA
  source 1..20: mol_type = other DNA
ctaagtaactatgtgatctt

SEQ ID NO: 11816 - DNA, 20 bp, synthetic construct
  misc_feature 1..20: note = Description of Artificial Sequence: Synthetic oligonucleotide
  misc_feature 1..20: note = Target: ANGPTL3; (-) strand; PAM type: YTN; PAM sequence: TTC
  source 1..20: mol_type = other DNA
tactaagtaactatgtgatc

SEQ ID NO: 11817 - DNA, 20 bp, synthetic construct
  misc_feature 1..20: note = Description of Artificial Sequence: Synthetic oligonucleotide
  misc_feature 1..20: note = Target: ANGPTL3; (-) strand; PAM type: YTN; PAM sequence: TTT
  source 1..20: mol_type = other DNA
ctactaagtaactatgtgat

SEQ ID NO: 11818 - DNA, 20 bp, synthetic construct
  misc_feature 1..20: note = Description of Artificial Sequence: Synthetic oligonucleotide
  misc_feature 1..20: note = Target: ANGPTL3; (-) strand; PAM type: YTN; PAM sequence: TTT
  source 1..20: mol_type = other DNA
tctactaagtaactatgtga

SEQ ID NO: 11819 - DNA, 20 bp, synthetic construct
  misc_feature 1..20: note = Description of Artificial Sequence: Synthetic oligonucleotide
  misc_feature 1..20: note = Target: ANGPTL3; (-) strand; PAM type: YTN; PAM sequence: CTT
  source 1..20: mol_type = other DNA
ttctactaagtaactatgtg

SEQ ID NO: 11820 - DNA, 20 bp, synthetic construct
  misc_feature 1..20: note = Description of Artificial Sequence: Synthetic oligonucleotide
  misc_feature 1..20: note = Target: ANGPTL3; (-) strand; PAM type: YTN; PAM sequence: CTC
  source 1..20: mol_type = other DNA
ttttctactaagtaactatg

SEQ ID NO: 11821 - DNA, 20 bp, synthetic construct
  misc_feature 1..20: note = Description of Artificial Sequence: Synthetic oligonucleotide
  misc_feature 1..20: note = Target: ANGPTL3; (-) strand; PAM type: YTN; PAM sequence: TTA
  source 1..20: mol_type = other DNA
ctcttttctactaagtaact

SEQ ID NO: 11822 - DNA, 20 bp, synthetic construct
  misc_feature 1..20: note = Description of Artificial Sequence: Synthetic oligonucleotide
  misc_feature 1..20: note = Target: ANGPTL3; (-) strand; PAM type: YTN; PAM sequence: CTG
  source 1..20: mol_type = other DNA
ggtattactcttttctacta

SEQ ID NO: 11823 - DNA, 20 bp, synthetic construct
  misc_feature 1..20: note = Description of Artificial Sequence: Synthetic oligonucleotide
  misc_feature 1..20: note = Target: ANGPTL3; (-) strand; PAM type: YTN; PAM sequence: TTG
  source 1..20: mol_type = other DNA
ctgggtattactcttttcta

SEQ ID NO: 11824 - DNA, 20 bp, synthetic construct
  misc_feature 1..20: note = Description of Artificial Sequence: Synthetic oligonucleotide
  misc_feature 1..20: note = Target: ANGPTL3; (-) strand; PAM type: YTN; PAM sequence: CTT
  source 1..20: mol_type = other DNA
gctgggtattactcttttct

SEQ ID NO: 11825 - DNA, 20 bp, synthetic construct
  misc_feature 1..20: note = Description of Artificial Sequence: Synthetic oligonucleotide
  misc_feature 1..20: note = Target: ANGPTL3; (-) strand; PAM type: YTN; PAM sequence: TTG
  source 1..20: mol_type = other DNA
cttgctgggtattactcttt

SEQ ID NO: 11826 - DNA, 20 bp, synthetic construct
  misc_feature 1..20: note = Description of Artificial Sequence: Synthetic oligonucleotide
  misc_feature 1..20: note = Target: ANGPTL3; (-) strand; PAM type: YTN; PAM sequence: TTT
  source 1..20: mol_type = other DNA
gcttgctgggtattactctt

SEQ ID NO: 11827 - DNA, 20 bp, synthetic construct
  misc_feature 1..20: note = Description of Artificial Sequence: Synthetic oligonucleotide
  misc_feature 1..20: note = Target: ANGPTL3; (-) strand; PAM type: YTN; PAM sequence: TTG
  source 1..20: mol_type = other DNA
taaagtttgcttgctgggta

SEQ ID NO: 11828 - DNA, 20 bp, synthetic construct
  misc_feature 1..20: note = Description of Artificial Sequence: Synthetic oligonucleotide
  misc_feature 1..20: note = Target: ANGPTL3; (-) strand; PAM type: YTN; PAM sequence: CTA
  source 1..20: mol_type = other DNA
ttgtaaagtttgcttgctgg

SEQ ID NO: 11829 - DNA, 20 bp, synthetic construct
  misc_feature 1..20: note = Description of Artificial Sequence: Synthetic oligonucleotide
  misc_feature 1..20: note = Target: ANGPTL3; (-) strand; PAM type: YTN; PAM sequence: TTA
  source 1..20: mol_type = other DNA
aaaggatctattgtaaagtt

SEQ ID NO: 11830 - DNA, 20 bp, synthetic construct
  misc_feature 1..20: note = Description of Artificial Sequence: Synthetic oligonucleotide
  misc_feature 1..20: note = Target: ANGPTL3; (-) strand; PAM type: YTN; PAM sequence: TTT
  source 1..20: mol_type = other DNA
aaaaggatctattgtaaagt

SEQ ID NO: 11831 - DNA, 20 bp, synthetic construct
  misc_feature 1..20: note = Description of Artificial Sequence: Synthetic oligonucleotide
  misc_feature 1..20: note = Target: ANGPTL3; (-) strand; PAM type: YTN; PAM sequence: TTA
  source 1..20: mol_type = other DNA
tttaaaaggatctattgtaa

SEQ ID NO: 11832 - DNA, 20 bp, synthetic construct
  misc_feature 1..20: note = Description of Artificial Sequence: Synthetic oligonucleotide
  misc_feature 1..20: note = Target: ANGPTL3; (-) strand; PAM type: YTN; PAM sequence: CTT
  source 1..20: mol_type = other DNA
atttaaaaggatctattgta

SEQ ID NO: 11833 - DNA, 20 bp, synthetic construct
  misc_feature 1..20: note = Description of Artificial Sequence: Synthetic oligonucleotide
  misc_feature 1..20: note = Target: ANGPTL3; (-) strand; PAM type: YTN; PAM sequence: CTA
  source 1..20: mol_type = other DNA
ggaccttatttaaaaggatc

SEQ ID NO: 11834 - DNA, 20 bp, synthetic construct
  misc_feature 1..20: note = Description of Artificial Sequence: Synthetic oligonucleotide
  misc_feature 1..20: note = Target: ANGPTL3; (-) strand; PAM type: YTN; PAM sequence: TTC
  source 1..20: mol_type = other DNA
ctaggaccttatttaaaagg

SEQ ID NO: 11835 - DNA, 20 bp, synthetic construct
  misc_feature 1..20: note = Description of Artificial Sequence: Synthetic oligonucleotide
  misc_feature 1..20: note = Target: ANGPTL3; (-) strand; PAM type: YTN; PAM sequence: TTT
  source 1..20: mol_type = other DNA
cctaggaccttatttaaaag

SEQ ID NO: 11836 - DNA, 20 bp, synthetic construct
  misc_feature 1..20: note = Description of Artificial Sequence: Synthetic oligonucleotide
  misc_feature 1..20: note = Target: ANGPTL3; (-) strand; PAM type: YTN; PAM sequence: CTG
  source 1..20: mol_type = other DNA
gcatgaatgatatttcctag

SEQ ID NO: 11837 - DNA, 20 bp, synthetic construct
  misc_feature 1..20: note = Description of Artificial Sequence: Synthetic oligonucleotide
  misc_feature 1..20: note = Target: ANGPTL3; (-) strand; PAM type: YTN; PAM sequence: TTG
  source 1..20: mol_type = other DNA
atgctggcatgaatgatatt

SEQ ID NO: 11838 - DNA, 20 bp, synthetic construct
  misc_feature 1..20: note = Description of Artificial Sequence: Synthetic oligonucleotide
  misc_feature 1..20: note = Target: ANGPTL3; (-) strand; PAM type: YTN; PAM sequence: TTT
  source 1..20: mol_type = other DNA
gatgctggcatgaatgatat

SEQ ID NO: 11839 - DNA, 20 bp, synthetic construct
  misc_feature 1..20: note = Description of Artificial Sequence: Synthetic oligonucleotide
  misc_feature 1..20: note = Target: ANGPTL3; (-) strand; PAM type: YTN; PAM sequence: TTT
  source 1..20: mol_type = other DNA
tgatgctggcatgaatgata

SEQ ID NO: 11840 - DNA, 20 bp, synthetic construct
  misc_feature 1..20: note = Description of Artificial Sequence: Synthetic oligonucleotide
  misc_feature 1..20: note = Target: ANGPTL3; (-) strand; PAM type: YTN; PAM sequence: TTT
  source 1..20: mol_type = other DNA
ttgatgctggcatgaatgat

SEQ ID NO: 11841 - DNA, 20 bp, synthetic construct
  misc_feature 1..20: note = Description of Artificial Sequence: Synthetic oligonucleotide
  misc_feature 1..20: note = Target: ANGPTL3; (-) strand; PAM type: YTN; PAM sequence: TTT
  source 1..20: mol_type = other DNA
tttgatgctggcatgaatga

SEQ ID NO: 11842 - DNA, 20 bp, synthetic construct
  misc_feature 1..20: note = Description of Artificial Sequence: Synthetic oligonucleotide
  misc_feature 1..20: note = Target: ANGPTL3; (-) strand; PAM type: YTN; PAM sequence: TTA
  source 1..20: mol_type = other DNA
gttttttgatgctggcatga

SEQ ID NO: 11843 - DNA, 20 bp, synthetic construct
  misc_feature 1..20: note = Description of Artificial Sequence: Synthetic oligonucleotide
  misc_feature 1..20: note = Target: ANGPTL3; (-) strand; PAM type: YTN; PAM sequence: TTA
  source 1..20: mol_type = other DNA
gtgttagttttttgatgctg

SEQ ID NO: 11844 - DNA, 20 bp, synthetic construct
  misc_feature 1..20: note = Description of Artificial Sequence: Synthetic oligonucleotide
  misc_feature 1..20: note = Target: ANGPTL3; (-) strand; PAM type: YTN; PAM sequence: TTA
  source 1..20: mol_type = other DNA
ttagtgttagttttttgatg

SEQ ID NO: 11845 - DNA, 20 bp, synthetic construct
  misc_feature 1..20: note = Description of Artificial Sequence: Synthetic oligonucleotide
  misc_feature 1..20: note = Target: ANGPTL3; (-) strand; PAM type: YTN; PAM sequence: TTG
  source 1..20: mol_type = other DNA
cattattagtgttagttttt

SEQ ID NO: 11846 - DNA, 20 bp, synthetic construct
  misc_feature 1..20: note = Description of Artificial Sequence: Synthetic oligonucleotide
  misc_feature 1..20: note = Target: ANGPTL3; (-) strand; PAM type: YTN; PAM sequence: CTT
  source 1..20: mol_type = other DNA
gcattattagtgttagtttt

SEQ ID NO: 11847 - DNA, 20 bp, synthetic construct
  misc_feature 1..20: note = Description of Artificial Sequence: Synthetic oligonucleotide
  misc_feature 1..20: note = Target: ANGPTL3; (-) strand; PAM type: YTN; PAM sequence: TTG
  source 1..20: mol_type = other DNA
acagtaagaaaagcagaata

SEQ ID NO: 11848 - DNA, 20 bp, synthetic construct
  misc_feature 1..20: note = Description of Artificial Sequence: Synthetic oligonucleotide
  misc_feature 1..20: note = Target: ANGPTL3; (-) strand; PAM type: YTN; PAM sequence: CTC
  source 1..20: mol_type = other DNA
attgacagtaagaaaagcag

SEQ ID NO: 11849 - DNA, 20 bp, synthetic construct
  misc_feature 1..20: note = Description of Artificial Sequence: Synthetic oligonucleotide
  misc_feature 1..20: note = Target: ANGPTL3; (-) strand; PAM type: YTN; PAM sequence: TTC
  source 1..20: mol_type = other DNA
tcattgacagtaagaaaagc

SEQ ID NO: 11850 - DNA, 20 bp, synthetic construct
  misc_feature 1..20: note = Description of Artificial Sequence: Synthetic oligonucleotide
  misc_feature 1..20: note = Target: ANGPTL3; (-) strand; PAM type: YTN; PAM sequence: TTT
  source 1..20: mol_type = other DNA
ctcattgacagtaagaaaag

SEQ ID NO: 11851 - DNA, 20 bp, synthetic construct
  misc_feature 1..20: note = Description of Artificial Sequence: Synthetic oligonucleotide
  misc_feature 1..20: note = Target: ANGPTL3; (-) strand; PAM type: YTN; PAM sequence: TTT
  source 1..20: mol_type = other DNA
tctcattgacagtaagaaaa

SEQ ID NO: 11852 - DNA, 20 bp, synthetic construct
  misc_feature 1..20: note = Description of Artificial Sequence: Synthetic oligonucleotide
  misc_feature 1..20: note = Target: ANGPTL3; (-) strand; PAM type: YTN; PAM sequence: TTT
  source 1..20: mol_type = other DNA
ttctcattgacagtaagaaa

SEQ ID NO: 11853 - DNA, 20 bp, synthetic construct
  misc_feature 1..20: note = Description of Artificial Sequence: Synthetic oligonucleotide
  misc_feature 1..20: note = Target: ANGPTL3; (-) strand; PAM type: YTN; PAM sequence: TTG
  source 1..20: mol_type = other DNA
aatgatagtttttctcattg

SEQ ID NO: 11854 - DNA, 20 bp, synthetic construct
  misc_feature 1..20: note = Description of Artificial Sequence: Synthetic oligonucleotide
  misc_feature 1..20: note = Target: ANGPTL3; (-) strand; PAM type: YTN; PAM sequence: TTA
  source 1..20: mol_type = other DNA
ttgaatgatagtttttctca

SEQ ID NO: 11855 - DNA, 20 bp, synthetic construct
  misc_feature 1..20: note = Description of Artificial Sequence: Synthetic oligonucleotide
  misc_feature 1..20: note = Target: ANGPTL3; (-) strand; PAM type: YTN; PAM sequence: TTT
  source 1..20: mol_type = other DNA
attgaatgatagtttttctc

SEQ ID NO: 11856 - DNA, 20 bp, synthetic construct
  misc_feature 1..20: note = Description of Artificial Sequence: Synthetic oligonucleotide
  misc_feature 1..20: note = Target: ANGPTL3; (-) strand; PAM type: YTN; PAM sequence: TTG
  source 1..20: mol_type = other DNA
caatttattgaatgatagtt

SEQ ID NO: 11857 - DNA, 20 bp, synthetic construct
  misc_feature 1..20: note = Description of Artificial Sequence: Synthetic oligonucleotide
  misc_feature 1..20: note = Target: ANGPTL3; (-) strand; PAM type: YTN; PAM sequence: TTT
  source 1..20: mol_type = other DNA
gcaatttattgaatgatagt

SEQ ID NO: 11858 - DNA, 20 bp, synthetic construct
  misc_feature 1..20: note = Description of Artificial Sequence: Synthetic oligonucleotide
  misc_feature 1..20: note = Target: ANGPTL3; (-) strand; PAM type: YTN; PAM sequence: TTG
  source 1..20: mol_type = other DNA
ggtttgcaatttattgaatg

SEQ ID NO: 11859 - DNA, 20 bp, synthetic construct
  misc_feature 1..20: note = Description of Artificial Sequence: Synthetic oligonucleotide
  misc_feature 1..20: note = Target: ANGPTL3; (-) strand; PAM type: YTN; PAM sequence: TTA
  source 1..20: mol_type = other DNA
agtgtgttgggtttgcaatt

SEQ ID NO: 11860 - DNA, 20 bp, synthetic construct
  misc_feature 1..20: note = Description of Artificial Sequence: Synthetic oligonucleotide
  misc_feature 1..20: note = Target: ANGPTL3; (-) strand; PAM type: YTN; PAM sequence: TTT
  source 1..20: mol_type = other DNA
aagtgtgttgggtttgcaat

SEQ ID NO: 11861 - DNA, 20 bp, synthetic construct
  misc_feature 1..20: note = Description of Artificial Sequence: Synthetic oligonucleotide
  misc_feature 1..20: note = Target: ANGPTL3; (-) strand; PAM type: YTN; PAM sequence: TTA
  source 1..20: mol_type = other DNA
tttaagtgtgttgggtttgc

SEQ ID NO: 11862 - DNA, 20 bp, synthetic construct
  misc_feature 1..20: note = Description of Artificial Sequence: Synthetic oligonucleotide
  misc_feature 1..20: note = Target: ANGPTL3; (-) strand; PAM type: YTN; PAM sequence: TTT
  source 1..20: mol_type = other DNA
atttaagtgtgttgggtttg

SEQ ID NO: 11863 - DNA, 20 bp, synthetic construct
  misc_feature 1..20: note = Description of Artificial Sequence: Synthetic oligonucleotide
  misc_feature 1..20: note = Target: ANGPTL3; (-) strand; PAM type: YTN; PAM sequence: TTT
  source 1..20: mol_type = other DNA
tatttaagtgtgttgggttt

SEQ ID NO: 11864 - DNA, 20 bp, synthetic construct
  misc_feature 1..20: note = Description of Artificial Sequence: Synthetic oligonucleotide
  misc_feature 1..20: note = Target: ANGPTL3; (-) strand; PAM type: YTN; PAM sequence: TTT
  source 1..20: mol_type = other DNA
ttatttaagtgtgttgggtt

SEQ ID NO: 11865 - DNA, 20 bp, synthetic construct
  misc_feature 1..20: note = Description of Artificial Sequence: Synthetic oligonucleotide
  misc_feature 1..20: note = Target: ANGPTL3; (-) strand; PAM type: YTN; PAM sequence: TTA
  source 1..20: mol_type = other DNA
tttttatttaagtgtgttgg

SEQ ID NO: 11866 - DNA, 20 bp, synthetic construct
  misc_feature 1..20: note = Description of Artificial Sequence: Synthetic oligonucleotide
  misc_feature 1..20: note = Target: ANGPTL3; (-) strand; PAM type: YTN; PAM sequence: TTT
  source 1..20: mol_type = other DNA
atttttatttaagtgtgttg

SEQ ID NO: 11867 - DNA, 20 bp, synthetic construct
  misc_feature 1..20: note = Description of Artificial Sequence: Synthetic oligonucleotide
  misc_feature 1..20: note = Target: ANGPTL3; (-) strand; PAM type: YTN; PAM sequence: TTT
  source 1..20: mol_type = other DNA
tatttttatttaagtgtgtt

SEQ ID NO: 11868 - DNA, 20 bp, synthetic construct
  misc_feature 1..20: note = Description of Artificial Sequence: Synthetic oligonucleotide
  misc_feature 1..20: note = Target: ANGPTL3; (-) strand; PAM type: YTN; PAM sequence: TTA
  source 1..20: mol_type = other DNA
gcagtaacattttattttta

SEQ ID NO: 11869 - DNA, 20 bp, synthetic construct
  misc_feature 1..20: note = Description of Artificial Sequence: Synthetic oligonucleotide
  misc_feature 1..20: note = Target: ANGPTL3; (-) strand; PAM type: YTN; PAM sequence: TTT
  source 1..20: mol_type = other DNA
agcagtaacattttattttt

SEQ ID NO: 11870 - DNA, 20 bp, synthetic construct
  misc_feature 1..20: note = Description of Artificial Sequence: Synthetic oligonucleotide
  misc_feature 1..20: note = Target: ANGPTL3; (-) strand; PAM type: YTN; PAM sequence: TTA
  source 1..20: mol_type = other DNA
gtttagcagtaacattttat

SEQ ID NO: 11871 - DNA, 20 bp, synthetic construct
  misc_feature 1..20: note = Description of Artificial Sequence: Synthetic oligonucleotide
  misc_feature 1..20: note = Target: ANGPTL3; (-) strand; PAM type: YTN; PAM sequence: TTA
  source 1..20: mol_type = other DNA
tcgttagtttagcagtaaca

SEQ ID NO: 11872 - DNA, 20 bp, synthetic construct
  misc_feature 1..20: note = Description of Artificial Sequence: Synthetic oligonucleotide
  misc_feature 1..20: note = Target: ANGPTL3; (-) strand; PAM type: YTN; PAM sequence: TTT
  source 1..20: mol_type = other DNA
atcgttagtttagcagtaac

SEQ ID NO: 11873 - DNA, 20 bp, synthetic construct
  misc_feature 1..20: note = Description of Artificial Sequence: Synthetic oligonucleotide
  misc_feature 1..20: note = Target: ANGPTL3; (-) strand; PAM type: YTN; PAM sequence: TTC
  source 1..20: mol_type = other DNA
agtagtttatcgttagttta

SEQ ID NO: 11874 - DNA, 20 bp, synthetic construct
  misc_feature 1..20: note = Description of Artificial Sequence: Synthetic oligonucleotide
  misc_feature 1..20: note = Target: ANGPTL3; (-) strand; PAM type: YTN; PAM sequence: CTA
  source 1..20: mol_type = other DNA
tatattcagtagtttatcgt

SEQ ID NO: 11875 - DNA, 20 bp, synthetic construct
  misc_feature 1..20: note = Description of Artificial Sequence: Synthetic oligonucleotide
  misc_feature 1..20: note = Target: ANGPTL3; (-) strand; PAM type: YTN; PAM sequence: TTC
  source 1..20: mol_type = other DNA
tatatattcagtagtttatc

SEQ ID NO: 11876 - DNA, 20 bp, synthetic construct
  misc_feature 1..20: note = Description of Artificial Sequence: Synthetic oligonucleotide
  misc_feature 1..20: note = Target: ANGPTL3; (-) strand; PAM type: YTN; PAM sequence: TTT
  source 1..20: mol_type = other DNA
ctatatattcagtagtttat

SEQ ID NO: 11877 - DNA, 20 bp, synthetic construct
  misc_feature 1..20: note = Description of Artificial Sequence: Synthetic oligonucleotide
  misc_feature 1..20: note = Target: ANGPTL3; (-) strand; PAM type: YTN; PAM sequence: CTT
  source 1..20: mol_type = other DNA
tctatatattcagtagttta

SEQ ID NO: 11878 - DNA, 20 bp, synthetic construct
  misc_feature 1..20: note = Description of Artificial Sequence: Synthetic oligonucleotide
  misc_feature 1..20: note = Target: ANGPTL3; (-) strand; PAM type: YTN; PAM sequence: TTA
  source 1..20: mol_type = other DNA
ctttctatatattcagtagt

SEQ ID NO: 11879 - DNA, 20 bp, synthetic construct
  misc_feature 1..20: note = Description of Artificial Sequence: Synthetic oligonucleotide
  misc_feature 1..20: note = Target: ANGPTL3; (-) strand; PAM type: YTN; PAM sequence: CTT
  source 1..20: mol_type = other DNA
actttctatatattcagtag

SEQ ID NO: 11880 - DNA, 20 bp, synthetic construct
  misc_feature 1..20: note = Description of Artificial Sequence: Synthetic oligonucleotide
  misc_feature 1..20: note = Target: ANGPTL3; (-) strand; PAM type: YTN; PAM sequence: TTG
  source 1..20: mol_type = other DNA
cttactttctatatattcag

SEQ ID NO: 11881 - DNA, 20 bp, synthetic construct
  misc_feature 1..20: note = Description of Artificial Sequence: Synthetic oligonucleotide
  misc_feature 1..20: note = Target: ANGPTL3; (-) strand; PAM type: YTN; PAM sequence: TTT
  source 1..20: mol_type = other DNA
gcttactttctatatattca

SEQ ID NO: 11882 - DNA, 20 bp, synthetic construct
  misc_feature 1..20: note = Description of Artificial Sequence: Synthetic oligonucleotide
  misc_feature 1..20: note = Target: ANGPTL3; (-) strand; PAM type: YTN; PAM sequence: TTG
  source 1..20: mol_type = other DNA
tttgcttactttctatatat

SEQ ID NO: 11883 - DNA, 20 bp, synthetic construct
  misc_feature 1..20: note = Description of Artificial Sequence: Synthetic oligonucleotide
  misc_feature 1..20: note = Target: ANGPTL3; (-) strand; PAM type: YTN; PAM sequence: TTT
  source 1..20: mol_type = other DNA
gtttgcttactttctatata

SEQ ID NO: 11884 - DNA, 20 bp, synthetic construct
  misc_feature 1..20: note = Description of Artificial Sequence: Synthetic oligonucleotide
  misc_feature 1..20: note = Target: ANGPTL3; (-) strand; PAM type: YTN; PAM sequence: TTG
  source 1..20: mol_type = other DNA
gcaagtttgtttgcttactt

SEQ ID NO: 11885 - DNA, 20 bp, synthetic construct
  misc_feature 1..20: note = Description of Artificial Sequence: Synthetic oligonucleotide
  misc_feature 1..20: note = Target: ANGPTL3; (-) strand; PAM type: YTN; PAM sequence: TTG
  source 1..20: mol_type = other DNA
gcaggttggcaagtttgttt

SEQ ID NO: 11886 - DNA, 20 bp, synthetic construct
  misc_feature 1..20: note = Description of Artificial Sequence: Synthetic oligonucleotide
  misc_feature 1..20: note = Target: ANGPTL3; (-) strand; PAM type: YTN; PAM sequence: CTG
  source 1..20: mol_type = other DNA
tagatgttggcaggttggca

SEQ ID NO: 11887 - DNA, 20 bp, synthetic construct
  misc_feature 1..20: note = Description of Artificial Sequence: Synthetic oligonucleotide
  misc_feature 1..20: note = Target: ANGPTL3; (-) strand; PAM type: YTN; PAM sequence: CTG
  source 1..20: mol_type = other DNA
taaacatatctgtagatgtt

SEQ ID NO: 11888 - DNA, 20 bp, synthetic construct
  misc_feature 1..20: note = Description of Artificial Sequence: Synthetic oligonucleotide
  misc_feature 1..20: note = Target: ANGPTL3; (-) strand; PAM type: YTN; PAM sequence: TTG
  source 1..20: mol_type = other DNA
acctgtaaacatatctgtag

SEQ ID NO: 11889 - DNA, 20 bp, synthetic construct
  misc_feature 1..20: note = Description of Artificial Sequence: Synthetic oligonucleotide
  misc_feature 1..20: note = Target: ANGPTL3; (-) strand; PAM type: YTN; PAM sequence: TTT
  source 1..20: mol_type = other DNA
gacctgtaaacatatctgta

SEQ ID NO: 11890 - DNA, 20 bp, synthetic construct
  misc_feature 1..20: note = Description of Artificial Sequence: Synthetic oligonucleotide
  misc_feature 1..20: note = Target: ANGPTL3; (-) strand; PAM type: YTN; PAM sequence: TTT
  source 1..20: mol_type = other DNA
tgacctgtaaacatatctgt

SEQ ID NO: 11891 - DNA, 20 bp, synthetic construct
  misc_feature 1..20: note = Description of Artificial Sequence: Synthetic oligonucleotide
  misc_feature 1..20: note = Target: ANGPTL3; (-) strand; PAM type: YTN; PAM sequence: TTT
  source 1..20: mol_type = other DNA
ttgacctgtaaacatatctg

SEQ ID NO: 11892 - DNA, 20 bp, synthetic construct
  misc_feature 1..20: note = Description of Artificial Sequence: Synthetic oligonucleotide
  misc_feature 1..20: note = Target: ANGPTL3; (-) strand; PAM type: YTN; PAM sequence: TTG
  source 1..20: mol_type = other DNA
ataatttttgacctgtaaac

SEQ ID NO: 11893 - DNA, 20 bp, synthetic construct
  misc_feature 1..20: note = Description of Artificial Sequence: Synthetic oligonucleotide
  misc_feature 1..20: note = Target: ANGPTL3; (-) strand; PAM type: YTN; PAM sequence: TTT
  source 1..20: mol_type = other DNA
gataatttttgacctgtaaa

SEQ ID NO: 11894 - DNA, 20 bp, synthetic construct
  misc_feature 1..20: note = Description of Artificial Sequence: Synthetic oligonucleotide
  misc_feature 1..20: note = Target: ANGPTL3; (-) strand; PAM type: YTN; PAM sequence: TTG
  source 1..20: mol_type = other DNA
ataatttgataatttttgac

SEQ ID NO: 11895 - DNA, 20 bp, synthetic construct
  misc_feature 1..20: note = Description of Artificial Sequence: Synthetic oligonucleotide
  misc_feature 1..20: note = Target: ANGPTL3; (-) strand; PAM type: YTN; PAM sequence: CTT
  source 1..20: mol_type = other DNA
gataatttgataatttttga

SEQ ID NO: 11896 - DNA, 20 bp, synthetic construct
  misc_feature 1..20: note = Description of Artificial Sequence: Synthetic oligonucleotide
  misc_feature 1..20: note = Target: ANGPTL3; (-) strand; PAM type: YTN; PAM sequence: TTC
  source 1..20: mol_type = other DNA
ttgataatttgataattttt

SEQ ID NO: 11897 - DNA, 20 bp, synthetic construct
  misc_feature 1..20: note = Description of Artificial Sequence: Synthetic oligonucleotide
  misc_feature 1..20: note = Target: ANGPTL3; (-) strand; PAM type: YTN; PAM sequence: TTT
  source 1..20: mol_type = other DNA
cttgataatttgataatttt

SEQ ID NO: 11898 - DNA, 20 bp, synthetic construct
  misc_feature 1..20: note = Description of Artificial Sequence: Synthetic oligonucleotide
  misc_feature 1..20: note = Target: ANGPTL3; (-) strand; PAM type: YTN; PAM sequence: CTT
  source 1..20: mol_type = other DNA
tcttgataatttgataattt

SEQ ID NO: 11899 - DNA, 20 bp, synthetic construct
  misc_feature 1..20: note = Description of Artificial Sequence: Synthetic oligonucleotide
  misc_feature 1..20: note = Target: ANGPTL3; (-) strand; PAM type: YTN; PAM sequence: TTG
  source 1..20: mol_type = other DNA
aaccaggctttcttgataat

SEQ ID NO: 11900 - DNA, 20 bp, synthetic construct
  misc_feature 1..20: note = Description of Artificial Sequence: Synthetic oligonucleotide
  misc_feature 1..20: note = Target: ANGPTL3; (-) strand; PAM type: YTN; PAM sequence: TTT
  source 1..20: mol_type = other DNA
gaaccaggctttcttgataa

SEQ ID NO: 11901 - DNA, 20 bp, synthetic construct
  misc_feature 1..20: note = Description of Artificial Sequence: Synthetic oligonucleotide
  misc_feature 1..20: note = Target: ANGPTL3; (-) strand; PAM type: YTN; PAM sequence: CTG
  source 1..20: mol_type = other DNA
tgataaagacataatacata

SEQ ID NO: 11902 - DNA, 20 bp, synthetic construct
  misc_feature 1..20: note = Description of Artificial Sequence: Synthetic oligonucleotide
  misc_feature 1..20: note = Target: ANGPTL3; (-) strand; PAM type: YTN; PAM sequence: TTC
  source 1..20: mol_type = other DNA
agacctgtgataaagacata

SEQ ID NO: 11903 - DNA, 20 bp, synthetic construct
  misc_feature 1..20: note = Description of Artificial Sequence: Synthetic oligonucleotide
  misc_feature 1..20: note = Target: ANGPTL3; (-) strand; PAM type: YTN; PAM sequence: CTT
  source 1..20: mol_type = other DNA
cagacctgtgataaagacat

SEQ ID NO: 11904 - DNA, 20 bp, synthetic construct
  misc_feature 1..20: note = Description of Artificial Sequence: Synthetic oligonucleotide
  misc_feature 1..20: note = Target: ANGPTL3; (-) strand; PAM type: YTN; PAM sequence: CTG
  source 1..20: mol_type = other DNA
atcttcagacctgtgataaa

SEQ ID NO: 11905 - DNA, 20 bp, synthetic construct
  misc_feature 1..20: note = Description of Artificial Sequence: Synthetic oligonucleotide
  misc_feature 1..20: note = Target: ANGPTL3; (-) strand; PAM type: YTN; PAM sequence: TTA
  source 1..20: mol_type = other DNA
ctgatcttcagacctgtgat

SEQ ID NO: 11906 - DNA, 20 bp, synthetic construct
  misc_feature 1..20: note = Description of Artificial Sequence: Synthetic oligonucleotide
  misc_feature 1..20: note = Target: ANGPTL3; (-) strand; PAM type: YTN; PAM sequence: CTT
  source 1..20: mol_type = other DNA
actgatcttcagacctgtga

SEQ ID NO: 11907 - DNA, 20 bp, synthetic construct
  misc_feature 1..20: note = Description of Artificial Sequence: Synthetic oligonucleotide
  misc_feature 1..20: note = Target: ANGPTL3; (-) strand; PAM type: YTN; PAM sequence: TTA
  source 1..20: mol_type = other DNA
ggtcttactgatcttcagac

SEQ ID NO: 11908 - DNA, 20 bp, synthetic construct
  misc_feature 1..20: note = Description of Artificial Sequence: Synthetic oligonucleotide
  misc_feature 1..20: note = Target: ANGPTL3; (-) strand; PAM type: YTN; PAM sequence: TTT
  source 1..20: mol_type = other DNA
aggtcttactgatcttcaga

SEQ ID NO: 11909 - DNA, 20 bp, synthetic construct
  misc_feature 1..20: note = Description of Artificial Sequence: Synthetic oligonucleotide
  misc_feature 1..20: note = Target: ANGPTL3; (-) strand; PAM type: YTN; PAM sequence: TTT
  source 1..20: mol_type = other DNA
taggtcttactgatcttcag

SEQ ID NO: 11910 - DNA, 20 bp, synthetic construct
  misc_feature 1..20: note = Description of Artificial Sequence: Synthetic oligonucleotide
  misc_feature 1..20: note = Target: ANGPTL3; (-) strand; PAM type: YTN; PAM sequence: TTC
  source 1..20: mol_type = other DNA
agttttaggtcttactgatc

SEQ ID NO: 11911 - DNA, 20 bp, synthetic construct
  misc_feature 1..20: note = Description of Artificial Sequence: Synthetic oligonucleotide
  misc_feature 1..20: note = Target: ANGPTL3; (-) strand; PAM type: YTN; PAM sequence: TTT
  source 1..20: mol_type = other DNA
cagttttaggtcttactgat

SEQ ID NO: 11912 - DNA, 20 bp, synthetic construct
  misc_feature 1..20: note = Description of Artificial Sequence: Synthetic oligonucleotide
  misc_feature 1..20: note = Target: ANGPTL3; (-) strand; PAM type: YTN; PAM sequence: TTT
  source 1..20: mol_type = other DNA
tcagttttaggtcttactga

SEQ ID NO: 11913 - DNA, 20 bp, synthetic construct
  misc_feature 1..20: note = Description of Artificial Sequence: Synthetic oligonucleotide
  misc_feature 1..20: note = Target: ANGPTL3; (-) strand; PAM type: YTN; PAM sequence: TTA
  source 1..20: mol_type = other DNA
ataattttcagttttaggtc

SEQ ID NO: 11914 - DNA, 20 bp, synthetic construct
  misc_feature 1..20: note = Description of Artificial Sequence: Synthetic oligonucleotide
  misc_feature 1..20: note = Target: ANGPTL3; (-) strand; PAM type: YTN; PAM sequence: TTT
  source 1..20: mol_type = other DNA
aataattttcagttttaggt

SEQ ID NO: 11915 - DNA, 20 bp, synthetic construct
  misc_feature 1..20: note = Description of Artificial Sequence: Synthetic oligonucleotide
  misc_feature 1..20: note = Target: ANGPTL3; (-) strand; PAM type: YTN; PAM sequence: TTA
  source 1..20: mol_type = other DNA
agtttaataattttcagttt

SEQ ID NO: 11916 - DNA, 20 bp, synthetic construct
  misc_feature 1..20: note = Description of Artificial Sequence: Synthetic oligonucleotide
  misc_feature 1..20: note = Target: ANGPTL3; (-) strand; PAM type: YTN; PAM sequence: TTT
  source 1..20: mol_type = other DNA
aagtttaataattttcagtt

SEQ ID NO: 11917 - DNA, 20 bp, synthetic construct
  misc_feature 1..20: note = Description of Artificial Sequence: Synthetic oligonucleotide
  misc_feature 1..20: note = Target: ANGPTL3; (-) strand; PAM type: YTN; PAM sequence: TTT
  source 1..20: mol_type = other DNA
taagtttaataattttcagt

SEQ ID NO: 11918 - DNA, 20 bp, synthetic construct
  misc_feature 1..20: note = Description of Artificial Sequence: Synthetic oligonucleotide
  misc_feature 1..20: note = Target: ANGPTL3; (-) strand; PAM type: YTN; PAM sequence: TTC
  source 1..20: mol_type = other DNA
agattttaagtttaataatt

SEQ ID NO: 11919 - DNA, 20 bp, synthetic construct
  misc_feature 1..20: note = Description of Artificial Sequence: Synthetic oligonucleotide
  misc_feature 1..20: note = Target: ANGPTL3; (-) strand; PAM type: YTN; PAM sequence: CTG
  source 1..20: mol_type = other DNA
ttcagattttaagtttaata

SEQ ID NO: 11920 - DNA, 20 bp, synthetic construct
  misc_feature 1..20: note = Description of Artificial Sequence: Synthetic oligonucleotide
  misc_feature 1..20: note = Target: ANGPTL3; (-) strand; PAM type: YTN; PAM sequence: TTC
  source 1..20: mol_type = other DNA
tgttcagattttaagtttaa

SEQ ID NO: 11921 - DNA, 20 bp, synthetic construct
  misc_feature 1..20: note = Description of Artificial Sequence: Synthetic oligonucleotide
  misc_feature 1..20: note = Target: ANGPTL3; (-) strand; PAM type: YTN; PAM sequence: TTG
  source 1..20: mol_type = other DNA
atattctgttcagattttaa

SEQ ID NO: 11922 - DNA, 20 bp, synthetic construct
  misc_feature 1..20: note = Description of Artificial Sequence: Synthetic oligonucleotide
  misc_feature 1..20: note = Target: ANGPTL3; (-) strand; PAM type: YTN; PAM sequence: TTT
  source 1..20: mol_type = other DNA
gatattctgttcagatttta

SEQ ID NO: 11923 - DNA, 20 bp, synthetic construct
  misc_feature 1..20: note = Description of Artificial Sequence: Synthetic oligonucleotide
  misc_feature 1..20: note = Target: ANGPTL3; (-) strand; PAM type: YTN; PAM sequence: TTA
  source 1..20: mol_type = other DNA
tatgaataaaatatatttga

SEQ ID NO: 11924 - DNA, 20 bp, synthetic construct
  misc_feature 1..20: note = Description of Artificial Sequence: Synthetic oligonucleotide
  misc_feature 1..20: note = Target: ANGPTL3; (-) strand; PAM type: YTN; PAM sequence: TTT
  source 1..20: mol_type = other DNA
atatgaataaaatatatttg

SEQ ID NO: 11925 - DNA, 20 bp, synthetic construct
  misc_feature 1..20: note = Description of Artificial Sequence: Synthetic oligonucleotide
  misc_feature 1..20: note = Target: ANGPTL3; (-) strand; PAM type: YTN; PAM sequence: TTA
  source 1..20: mol_type = other DNA
tttatatgaataaaatatat

SEQ ID NO: 11926 - DNA, 20 bp, synthetic construct
  misc_feature 1..20: note = Description of Artificial Sequence: Synthetic oligonucleotide
  misc_feature 1..20: note = Target: ANGPTL3; (-) strand; PAM type: YTN; PAM sequence: TTT
  source 1..20: mol_type = other DNA
atttatatgaataaaatata

SEQ ID NO: 11927 - DNA, 20 bp, synthetic construct
  misc_feature 1..20: note = Description of Artificial Sequence: Synthetic oligonucleotide
  misc_feature 1..20: note = Target: ANGPTL3; (-) strand; PAM type: YTN; PAM sequence: TTT
  source 1..20: mol_type = other DNA
tatttatatgaataaaatat

SEQ ID NO: 11928 - DNA, 20 bp, synthetic construct
  misc_feature 1..20: note = Description of Artificial Sequence: Synthetic oligonucleotide
  misc_feature 1..20: note = Target: ANGPTL3; (-) strand; PAM type: YTN; PAM sequence: CTT
  source 1..20: mol_type = other DNA
ttatttatatgaataaaata

SEQ ID NO: 11929 - DNA, 20 bp, synthetic construct
  misc_feature 1..20: note = Description of Artificial Sequence: Synthetic oligonucleotide
  misc_feature 1..20: note = Target: ANGPTL3; (-) strand; PAM type: YTN; PAM sequence: TTC
  source 1..20: mol_type = other DNA
ttttatttatatgaataaaa

SEQ ID NO: 11930 - DNA, 20 bp, synthetic construct
  misc_feature 1..20: note = Description of Artificial Sequence: Synthetic oligonucleotide
  misc_feature 1..20: note = Target: ANGPTL3; (-) strand; PAM type: YTN; PAM sequence: TTG
  source 1..20: mol_type = other DNA
taatgtattcttttatttat

SEQ ID NO: 11931 - DNA, 20 bp, synthetic construct
  misc_feature 1..20: note = Description of Artificial Sequence: Synthetic oligonucleotide
  misc_feature 1..20: note = Target: ANGPTL3; (-) strand; PAM type: YTN; PAM sequence: TTA
  source 1..20: mol_type = other DNA
gaatattgtaatgtattctt

SEQ ID NO: 11932 - DNA, 20 bp, synthetic construct
  misc_feature 1..20: note = Description of Artificial Sequence: Synthetic oligonucleotide
  misc_feature 1..20: note = Target: ANGPTL3; (-) strand; PAM type: YTN; PAM sequence: CTT
  source 1..20: mol_type = other DNA
agaatattgtaatgtattct

SEQ ID NO: 11933 - DNA, 20 bp, synthetic construct
  misc_feature 1..20: note = Description of Artificial Sequence: Synthetic oligonucleotide
  misc_feature 1..20: note = Target: ANGPTL3; (-) strand; PAM type: YTN; PAM sequence: TTG
  source 1..20: mol_type = other DNA
cttagaatattgtaatgtat

SEQ ID NO: 11934 - DNA, 20 bp, synthetic construct
  misc_feature 1..20: note = Description of Artificial Sequence: Synthetic oligonucleotide
  misc_feature 1..20: note = Target: ANGPTL3; (-) strand; PAM type: YTN; PAM sequence: TTT
  source 1..20: mol_type = other DNA
gcttagaatattgtaatgta

SEQ ID NO: 11935 - DNA, 20 bp, synthetic construct
  misc_feature 1..20: note = Description of Artificial Sequence: Synthetic oligonucleotide
  misc_feature 1..20: note = Target: ANGPTL3; (-) strand; PAM type: YTN; PAM sequence: CTT
  source 1..20: mol_type = other DNA
tgcttagaatattgtaatgt

SEQ ID NO: 11936 - DNA, 20 bp, synthetic construct
  misc_feature 1..20: note = Description of Artificial Sequence: Synthetic oligonucleotide
  misc_feature 1..20: note = Target: ANGPTL3; (-) strand; PAM type: YTN; PAM sequence: CTG
  source 1..20: mol_type = other DNA
ctttgcttagaatattgtaa

SEQ ID NO: 11937 - DNA, 20 bp, synthetic construct
  misc_feature 1..20: note = Description of Artificial Sequence: Synthetic oligonucleotide
  misc_feature 1..20: note = Target: ANGPTL3; (-) strand; PAM type: YTN; PAM sequence: TTG
  source 1..20: mol_type = other DNA
gtcggaaaacagagcaaggc

SEQ ID NO: 11938 - DNA, 20 bp, synthetic construct
  misc_feature 1..20: note = Description of Artificial Sequence: Synthetic oligonucleotide
  misc_feature 1..20: note = Target: ANGPTL3; (-) strand; PAM type: YTN; PAM sequence: TTA
  source 1..20: mol_type = other DNA
ataagataaaaaaataaagc

SEQ ID NO: 11939 - DNA, 20 bp, synthetic construct
  misc_feature 1..20: note = Description of Artificial Sequence: Synthetic oligonucleotide
  misc_feature 1..20: note = Target: ANGPTL3; (-) strand; PAM type: YTN; PAM sequence: TTT
  source 1..20: mol_type = other DNA
aataagataaaaaaataaag

SEQ ID NO: 11940 - DNA, 20 bp, synthetic construct
  misc_feature 1..20: note = Description of Artificial Sequence: Synthetic oligonucleotide
  misc_feature 1..20: note = Target: ANGPTL3; (-) strand; PAM type: YTN; PAM sequence: TTA
  source 1..20: mol_type = other DNA
tttaataagataaaaaaata

SEQ ID NO: 11941 - DNA, 20 bp, synthetic construct
  misc_feature 1..20: note = Description of Artificial Sequence: Synthetic oligonucleotide
  misc_feature 1..20: note = Target: ANGPTL3; (-) strand; PAM type: YTN; PAM sequence: TTA
  source 1..20: mol_type = other DNA
atcagggacattatttaata

SEQ ID NO: 11942 - DNA, 20 bp, synthetic construct
  misc_feature 1..20: note = Description of Artificial Sequence: Synthetic oligonucleotide
  misc_feature 1..20: note = Target: ANGPTL3; (-) strand; PAM type: YTN; PAM sequence: TTT
  source 1..20: mol_type = other DNA
aatcagggacattatttaat

SEQ ID NO: 11943 - DNA, 20 bp, synthetic construct
  misc_feature 1..20: note = Description of Artificial Sequence: Synthetic oligonucleotide
  misc_feature 1..20: note = Target: ANGPTL3; (-) strand; PAM type: YTN; PAM sequence: CTC
  source 1..20: mol_type = other DNA
aaaatatttaatcagggaca

SEQ ID NO: 11944 - DNA, 20 bp, synthetic construct
  misc_feature 1..20: note = Description of Artificial Sequence: Synthetic oligonucleotide
  misc_feature 1..20: note = Target: ANGPTL3; (-) strand; PAM type: YTN; PAM sequence: TTC
  source 1..20: mol_type = other DNA
tcaaaatatttaatcaggga

SEQ ID NO: 11945 - DNA, 20 bp, synthetic construct
  misc_feature 1..20: note = Description of Artificial Sequence: Synthetic oligonucleotide
  misc_feature 1..20: note = Target: ANGPTL3; (-) strand; PAM type: YTN; PAM sequence: CTG
  source 1..20: mol_type = other DNA
ttctcaaaatatttaatcag

SEQ ID NO: 11946 - DNA, 20 bp, synthetic construct
  misc_feature 1..20: note = Description of Artificial Sequence: Synthetic oligonucleotide
  misc_feature 1..20: note = Target: ANGPTL3; (-) strand; PAM type: YTN; PAM sequence: TTA
  source 1..20: mol_type = other DNA
cctgttctcaaaatatttaa

SEQ ID NO: 11947 - DNA, 20 bp, synthetic construct
  misc_feature 1..20: note = Description of Artificial Sequence: Synthetic oligonucleotide
  misc_feature 1..20: note = Target: ANGPTL3; (-) strand; PAM type: YTN; PAM sequence: TTG
  source 1..20: mol_type = other DNA
tacagattacctgttctcaa

SEQ ID NO: 11948 - DNA, 20 bp, synthetic construct
  misc_feature 1..20: note = Description of Artificial Sequence: Synthetic oligonucleotide
  misc_feature 1..20: note = Target: ANGPTL3; (-) strand; PAM type: YTN; PAM sequence: TTC
  source 1..20: mol_type = other DNA
agattgtacagattacctgt

SEQ ID NO: 11949 - DNA, 20 bp, synthetic construct
  misc_feature 1..20: note = Description of Artificial Sequence: Synthetic oligonucleotide
  misc_feature 1..20: note = Target: ANGPTL3; (-) strand; PAM type: YTN; PAM sequence: TTA
  source 1..20: mol_type = other DNA
ttcagattgtacagattacc

SEQ ID NO: 11950 - DNA, 20 bp, synthetic construct
  misc_feature 1..20: note = Description of Artificial Sequence: Synthetic oligonucleotide
  misc_feature 1..20: note = Target: ANGPTL3; (-) strand; PAM type: YTN; PAM sequence: TTA
  source 1..20: mol_type = other DNA
gataaacagtgttattcaga

SEQ ID NO: 11951 - DNA, 20 bp, synthetic construct
  misc_feature 1..20: note = Description of Artificial Sequence: Synthetic oligonucleotide
  misc_feature 1..20: note = Target: ANGPTL3; (-) strand; PAM type: YTN; PAM sequence: TTT
  source 1..20: mol_type = other DNA
agataaacagtgttattcag

SEQ ID NO: 11952 - DNA, 20 bp, synthetic construct
  misc_feature 1..20: note = Description of Artificial Sequence: Synthetic oligonucleotide
  misc_feature 1..20: note = Target: ANGPTL3; (-) strand; PAM type: YTN; PAM sequence: TTG
  source 1..20: mol_type = other DNA
atatttagataaacagtgtt

SEQ ID NO: 11953 - DNA, 20 bp, synthetic construct
  misc_feature 1..20: note = Description of Artificial Sequence: Synthetic oligonucleotide
  misc_feature 1..20: note = Target: ANGPTL3; (-) strand; PAM type: YTN; PAM sequence: TTT
  source 1..20: mol_type = other DNA
gatatttagataaacagtgt

SEQ ID NO: 11954 - DNA, 20 bp, synthetic construct
  misc_feature 1..20: note = Description of Artificial Sequence: Synthetic oligonucleotide
  misc_feature 1..20: note = Target: ANGPTL3; (-) strand; PAM type: YTN; PAM sequence: TTA
  source 1..20: mol_type = other DNA
taacggtgtttgatatttag

SEQ ID NO: 11955 - DNA, 20 bp, synthetic construct
  misc_feature 1..20: note = Description of Artificial Sequence: Synthetic oligonucleotide
  misc_feature 1..20: note = Target: ANGPTL3; (-) strand; PAM type: YTN; PAM sequence: TTC
  source 1..20: mol_type = other DNA
ataatgttataacggtgttt

SEQ ID NO: 11956 - DNA, 20 bp, synthetic construct
  misc_feature 1..20: note = Description of Artificial Sequence: Synthetic oligonucleotide
  misc_feature 1..20: note = Target: ANGPTL3; (-) strand; PAM type: YTN; PAM sequence: TTC
  source 1..20: mol_type = other DNA
agttcataatgttataacgg

SEQ ID NO: 11957 - DNA, 20 bp, synthetic construct
  misc_feature 1..20: note = Description of Artificial Sequence: Synthetic oligonucleotide
  misc_feature 1..20: note = Target: ANGPTL3; (-) strand; PAM type: YTN; PAM sequence: TTT
  source 1..20: mol_type = other DNA
cagttcataatgttataacg

SEQ ID NO: 11958 - DNA, 20 bp, synthetic construct
  misc_feature 1..20: note = Description of Artificial Sequence: Synthetic oligonucleotide
  misc_feature 1..20: note = Target: ANGPTL3; (-) strand; PAM type: YTN; PAM sequence: CTT
  source 1..20: mol_type = other DNA
tcagttcataatgttataac

SEQ ID NO: 11959 - DNA, 20 bp, synthetic construct
  misc_feature 1..20: note = Description of Artificial Sequence: Synthetic oligonucleotide
  misc_feature 1..20: note = Target: ANGPTL3; (-) strand; PAM type: YTN; PAM sequence: TTG
  source 1..20: mol_type = other DNA
tctttcagttcataatgtta

SEQ ID NO: 11960 - DNA, 20 bp, synthetic construct
  misc_feature 1..20: note = Description of Artificial Sequence: Synthetic oligonucleotide
  misc_feature 1..20: note = Target: ANGPTL3; (-) strand; PAM type: YTN; PAM sequence: TTT
  source 1..20: mol_type = other DNA
gtctttcagttcataatgtt

SEQ ID NO: 11961 - DNA, 20 bp, synthetic construct
  misc_feature 1..20: note = Description of Artificial Sequence: Synthetic oligonucleotide
  misc_feature 1..20: note = Target: ANGPTL3; (-) strand; PAM type: YTN; PAM sequence: CTG
  source 1..20: mol_type = other DNA
agtaaggatgtcagaagtac

SEQ ID NO: 11962 - DNA, 20 bp, synthetic construct
  misc_feature 1..20: note = Description of Artificial Sequence: Synthetic oligonucleotide
  misc_feature 1..20: note = Target: ANGPTL3; (-) strand; PAM type: YTN; PAM sequence: TTA
  source 1..20: mol_type = other DNA
ggggaaatctgagtaaggat

SEQ ID NO: 11963 - DNA, 20 bp, synthetic construct
  misc_feature 1..20: note = Description of Artificial Sequence: Synthetic oligonucleotide
  misc_feature 1..20: note = Target: ANGPTL3; (-) strand; PAM type: YTN; PAM sequence: CTG
  source 1..20: mol_type = other DNA
aatatacaattaggggaaat

SEQ ID NO: 11964 - DNA, 20 bp, synthetic construct
  misc_feature 1..20: note = Description of Artificial Sequence: Synthetic oligonucleotide
  misc_feature 1..20: note = Target: ANGPTL3; (-) strand; PAM type: YTN; PAM sequence: TTA
  source 1..20: mol_type = other DNA
aaatgatactgaatatacaa

SEQ ID NO: 11965 - DNA, 20 bp, synthetic construct
  misc_feature 1..20: note = Description of Artificial Sequence: Synthetic oligonucleotide
  misc_feature 1..20: note = Target: ANGPTL3; (-) strand; PAM type: YTN; PAM sequence: TTT
  source 1..20: mol_type = other DNA
aaaatgatactgaatataca

SEQ ID NO: 11966 - DNA, 20 bp, synthetic construct
  misc_feature 1..20: note = Description of Artificial Sequence: Synthetic oligonucleotide
  misc_feature 1..20: note = Target: ANGPTL3; (-) strand; PAM type: YTN; PAM sequence: TTT
  source 1..20: mol_type = other DNA
taaaatgatactgaatatac

SEQ ID NO: 11967 - DNA, 20 bp, synthetic construct
  misc_feature 1..20: note = Description of Artificial Sequence: Synthetic oligonucleotide
  misc_feature 1..20: note = Target: ANGPTL3; (-) strand; PAM type: YTN; PAM sequence: TTT
  source 1..20: mol_type = other DNA
ttaaaatgatactgaatata

SEQ ID NO: 11968 - DNA, 20 bp, synthetic construct
  misc_feature 1..20: note = Description of Artificial Sequence: Synthetic oligonucleotide
  misc_feature 1..20: note = Target: ANGPTL3; (-) strand; PAM type: YTN; PAM sequence: TTT
  source 1..20: mol_type = other DNA
tttaaaatgatactgaatat

SEQ ID NO: 11969 - DNA, 20 bp, synthetic construct
  misc_feature 1..20: note = Description of Artificial Sequence: Synthetic oligonucleotide
  misc_feature 1..20: note = Target: ANGPTL3; (-) strand; PAM type: YTN; PAM sequence: CTG
  source 1..20: mol_type = other DNA
ttttttaaaatgatactgaa

SEQ ID NO: 11970 - DNA, 20 bp, synthetic construct
  misc_feature 1..20: note = Description of Artificial Sequence: Synthetic oligonucleotide
  misc_feature 1..20: note = Target: ANGPTL3; (-) strand; PAM type: YTN; PAM sequence: CTG
  source 1..20: mol_type = other DNA
ataaaagaatataaatctgt

SEQ ID NO: 11971 - DNA, 20 bp, synthetic construct
  misc_feature 1..20: note = Description of Artificial Sequence: Synthetic oligonucleotide
  misc_feature 1..20: note = Target: ANGPTL3; (-) strand; PAM type: YTN; PAM sequence: CTG
  source 1..20: mol_type = other DNA
agctgataaaagaatataaa

SEQ ID NO: 11972 - DNA, 20 bp, synthetic construct
  misc_feature 1..20: note = Description of Artificial Sequence: Synthetic oligonucleotide
  misc_feature 1..20: note = Target: ANGPTL3; (-) strand; PAM type: YTN; PAM sequence: TTC
  source 1..20: mol_type = other DNA
tgagctgataaaagaatata

SEQ ID NO: 11973 - DNA, 20 bp, synthetic construct
  misc_feature 1..20: note = Description of Artificial Sequence: Synthetic oligonucleotide
  misc_feature 1..20: note = Target: ANGPTL3; (-) strand; PAM type: YTN; PAM sequence: CTT
  source 1..20: mol_type = other DNA
ctgagctgataaaagaatat

SEQ ID NO: 11974 - DNA, 20 bp, synthetic construct
  misc_feature 1..20: note = Description of Artificial Sequence: Synthetic oligonucleotide
  misc_feature 1..20: note = Target: ANGPTL3; (-) strand; PAM type: YTN; PAM sequence: CTA
  source 1..20: mol_type = other DNA
gtccttctgagctgataaaa

SEQ ID NO: 11975 - DNA, 20 bp, synthetic construct
  misc_feature 1..20: note = Description of Artificial Sequence: Synthetic oligonucleotide
  misc_feature 1..20: note = Target: ANGPTL3; (-) strand; PAM type: YTN; PAM sequence: TTG
  source 1..20: mol_type = other DNA
aatactagtccttctgagct

SEQ ID NO: 11976 - DNA, 20 bp, synthetic construct
  misc_feature 1..20: note = Description of Artificial Sequence: Synthetic oligonucleotide
  misc_feature 1..20: note = Target: ANGPTL3; (-) strand; PAM type: YTN; PAM sequence: CTT
  source 1..20: mol_type = other DNA
gaatactagtccttctgagc

SEQ ID NO: 11977 - DNA, 20 bp, synthetic construct
  misc_feature 1..20: note = Description of Artificial Sequence: Synthetic oligonucleotide
  misc_feature 1..20: note = Target: ANGPTL3; (-) strand; PAM type: YTN; PAM sequence: TTC
  source 1..20: mol_type = other DNA
ttgaatactagtccttctga

SEQ ID NO: 11978 - DNA, 20 bp, synthetic construct
  misc_feature 1..20: note = Description of Artificial Sequence: Synthetic oligonucleotide
  misc_feature 1..20: note = Target: ANGPTL3; (-) strand; PAM type: YTN; PAM sequence: CTG
  source 1..20: mol_type = other DNA
tgggttcttgaatactagtc

SEQ ID NO: 11979 - DNA, 20 bp, synthetic construct
  misc_feature 1..20: note = Description of Artificial Sequence: Synthetic oligonucleotide
  misc_feature 1..20: note = Target: ANGPTL3; (-) strand; PAM type: YTN; PAM sequence: TTC
  source 1..20: mol_type = other DNA
tgtgggttcttgaatactag

SEQ ID NO: 11980 - DNA, 20 bp, synthetic construct
  misc_feature 1..20: note = Description of Artificial Sequence: Synthetic oligonucleotide
  misc_feature 1..20: note = Target: ANGPTL3; (-) strand; PAM type: YTN; PAM sequence: TTT
  source 1..20: mol_type = other DNA
ctgtgggttcttgaatacta

SEQ ID NO: 11981 - DNA, 20 bp, synthetic construct
  misc_feature 1..20: note = Description of Artificial Sequence: Synthetic oligonucleotide
  misc_feature 1..20: note = Target: ANGPTL3; (-) strand; PAM type: YTN; PAM sequence: TTG
  source 1..20: mol_type = other DNA
gaagatagagaaatttctgt

SEQ ID NO: 11982 - DNA, 20 bp, synthetic construct
  misc_feature 1..20: note = Description of Artificial Sequence: Synthetic oligonucleotide
  misc_feature 1..20: note = Target: ANGPTL3; (-) strand; PAM type: YTN; PAM sequence: CTT
  source 1..20: mol_type = other DNA
ggaagatagagaaatttctg

SEQ ID NO: 11983 - DNA, 20 bp, synthetic construct
  misc_feature 1..20: note = Description of Artificial Sequence: Synthetic oligonucleotide
  misc_feature 1..20: note = Target: ANGPTL3; (-) strand; PAM type: YTN; PAM sequence: TTG
  source 1..20: mol_type = other DNA
gcttggaagatagagaaatt

SEQ ID NO: 11984 - DNA, 20 bp, synthetic construct
  misc_feature 1..20: note = Description of Artificial Sequence: Synthetic oligonucleotide
  misc_feature 1..20: note = Target: ANGPTL3; (-) strand; PAM type: YTN; PAM sequence: CTT
  source 1..20: mol_type = other DNA
ggcttggaagatagagaaat

SEQ ID NO: 11985 - DNA, 20 bp, synthetic construct
  misc_feature 1..20: note = Description of Artificial Sequence: Synthetic oligonucleotide
  misc_feature 1..20: note = Target: ANGPTL3; (-) strand; PAM type: YTN; PAM sequence: CTC
  source 1..20: mol_type = other DNA
ttggcttggaagatagagaa

SEQ ID NO: 11986 - DNA, 20 bp, synthetic construct
  misc_feature 1..20: note = Description of Artificial Sequence: Synthetic oligonucleotide
  misc_feature 1..20: note = Target: ANGPTL3; (-) strand; PAM type: YTN; PAM sequence: TTG
  source 1..20: mol_type = other DNA
gtgctcttggcttggaagat

SEQ ID NO: 11987 - DNA, 20 bp, synthetic construct
  misc_feature 1..20: note = Description of Artificial Sequence: Synthetic oligonucleotide
  misc_feature 1..20: note = Target: ANGPTL3; (-) strand; PAM type: YTN; PAM sequence: CTT
  source 1..20: mol_type = other DNA
ggtgctcttggcttggaaga

SEQ ID NO: 11988 - DNA, 20 bp, synthetic construct
  misc_feature 1..20: note = Description of Artificial Sequence: Synthetic oligonucleotide
  misc_feature 1..20: note = Target: ANGPTL3; (-) strand; PAM type: YTN; PAM sequence: TTC
  source 1..20: mol_type = other DNA
ttggtgctcttggcttggaa

SEQ ID NO: 11989 - DNA, 20 bp, synthetic construct
  misc_feature 1..20: note = Description of Artificial Sequence: Synthetic oligonucleotide
  misc_feature 1..20: note = Target: ANGPTL3; (-) strand; PAM type: YTN; PAM sequence: CTG
  source 1..20: mol_type = other DNA
aagaaagggagtagttcttg

SEQ ID NO: 11990 - DNA, 20 bp, synthetic construct
  misc_feature 1..20: note = Description of Artificial Sequence: Synthetic oligonucleotide
  misc_feature 1..20: note = Target: ANGPTL3; (-) strand; PAM type: YTN; PAM sequence: TTC
  source 1..20: mol_type = other DNA
aactgaagaaagggagtagt

SEQ ID NO: 11991 - DNA, 20 bp, synthetic construct
  misc_feature 1..20: note = Description of Artificial Sequence: Synthetic oligonucleotide
  misc_feature 1..20: note = Target: ANGPTL3; (-) strand; PAM type: YTN; PAM sequence: TTC
  source 1..20: mol_type = other DNA
attcaactgaagaaagggag

SEQ ID NO: 11992 - DNA, 20 bp, synthetic construct
  misc_feature 1..20: note = Description of Artificial Sequence: Synthetic oligonucleotide
  misc_feature 1..20: note = Target: ANGPTL3; (-) strand; PAM type: YTN; PAM sequence: TTT
  source 1..20: mol_type = other DNA
cattcaactgaagaaaggga

SEQ ID NO: 11993 - DNA, 20 bp, synthetic construct
  misc_feature 1..20: note = Description of Artificial Sequence: Synthetic oligonucleotide
  misc_feature 1..20: note = Target: ANGPTL3; (-) strand; PAM type: YTN; PAM sequence: TTA
  source 1..20: mol_type = other DNA
tttcattcaactgaagaaag

SEQ ID NO: 11994 - DNA, 20 bp, synthetic construct
  misc_feature 1..20: note = Description of Artificial Sequence: Synthetic oligonucleotide
  misc_feature 1..20: note = Target: ANGPTL3; (-) strand; PAM type: YTN; PAM sequence: CTT
  source 1..20: mol_type = other DNA
atttcattcaactgaagaaa

SEQ ID NO: 11995 - DNA, 20 bp, synthetic construct
  misc_feature 1..20: note = Description of Artificial Sequence: Synthetic oligonucleotide
  misc_feature 1..20: note = Target: ANGPTL3; (-) strand; PAM type: YTN; PAM sequence: TTC
  source 1..20: mol_type = other DNA
ttatttcattcaactgaaga

SEQ ID NO: 11996 - DNA, 20 bp, synthetic construct
  misc_feature 1..20: note = Description of Artificial Sequence: Synthetic oligonucleotide
  misc_feature 1..20: note = Target: ANGPTL3; (-) strand; PAM type: YTN; PAM sequence: TTT
  source 1..20: mol_type = other DNA
cttatttcattcaactgaag

SEQ ID NO: 11997 - DNA, 20 bp, synthetic construct
  misc_feature 1..20: note = Description of Artificial Sequence: Synthetic oligonucleotide
  misc_feature 1..20: note = Target: ANGPTL3; (-) strand; PAM type: YTN; PAM sequence: TTA
  source 1..20: mol_type = other DNA
catttcttatttcattcaac

SEQ ID NO: 11998 - DNA, 20 bp, synthetic construct
  misc_feature 1..20: note = Description of Artificial Sequence: Synthetic oligonucleotide
  misc_feature 1..20: note = Target: ANGPTL3; (-) strand; PAM type: YTN; PAM sequence: TTT
  source 1..20: mol_type = other DNA
acatttcttatttcattcaa

SEQ ID NO: 11999 - DNA, 20 bp, synthetic construct
  misc_feature 1..20: note = Description of Artificial Sequence: Synthetic oligonucleotide
  misc_feature 1..20: note = Target: ANGPTL3; (-) strand; PAM type: YTN; PAM sequence: TTT
  source 1..20: mol_type = other DNA
tacatttcttatttcattca

SEQ ID NO: 12000 - DNA, 20 bp, synthetic construct
  misc_feature 1..20: note = Description of Artificial Sequence: Synthetic oligonucleotide
  misc_feature 1..20: note = Target: ANGPTL3; (-) strand; PAM type: YTN; PAM sequence: TTA
  source 1..20: mol_type = other DNA
ccatcatgttttacatttct

SEQ ID NO: 12001 - DNA, 20 bp, synthetic construct
  misc_feature 1..20: note = Description of Artificial Sequence: Synthetic oligonucleotide
  misc_feature 1..20: note = Target: ANGPTL3; (-) strand; PAM type: YTN; PAM sequence: CTT
  source 1..20: mol_type = other DNA
accatcatgttttacatttc

SEQ ID NO: 12002 - DNA, 20 bp, synthetic construct
  misc_feature 1..20: note = Description of Artificial Sequence: Synthetic oligonucleotide
  misc_feature 1..20: note = Target: ANGPTL3; (-) strand; PAM type: YTN; PAM sequence: TTC
  source 1..20: mol_type = other DNA
aagaaggaaacccaccaaag

SEQ ID NO: 12003 - DNA, 20 bp, synthetic construct
  misc_feature 1..20: note = Description of Artificial Sequence: Synthetic oligonucleotide
  misc_feature 1..20: note = Target: ANGPTL3; (-) strand; PAM type: YTN; PAM sequence: CTT
  source 1..20: mol_type = other DNA
caagaaggaaacccaccaaa

SEQ ID NO: 12004 - DNA, 20 bp, synthetic construct
  misc_feature 1..20: note = Description of Artificial Sequence: Synthetic oligonucleotide
  misc_feature 1..20: note = Target: ANGPTL3; (-) strand; PAM type: YTN; PAM sequence: TTG
  source 1..20: mol_type = other DNA
ataataatagcttcaagaag

SEQ ID NO: 12005 - DNA, 20 bp, synthetic construct
  misc_feature 1..20: note = Description of Artificial Sequence: Synthetic oligonucleotide
  misc_feature 1..20: note = Target: ANGPTL3; (-) strand; PAM type: YTN; PAM sequence: TTT
  source 1..20: mol_type = other DNA
gataataatagcttcaagaa

SEQ ID NO: 12006 - DNA, 20 bp, synthetic construct
  misc_feature 1..20: note = Description of Artificial Sequence: Synthetic oligonucleotide
  misc_feature 1..20: note = Target: ANGPTL3; (-) strand; PAM type: YTN; PAM sequence: CTA
  source 1..20: mol_type = other DNA
agaatagggaatttgataat

SEQ ID NO: 12007 - DNA, 20 bp, synthetic construct
  misc_feature 1..20: note = Description of Artificial Sequence: Synthetic oligonucleotide
  misc_feature 1..20: note = Target: ANGPTL3; (-) strand; PAM type: YTN; PAM sequence: CTA
  source 1..20: mol_type = other DNA
gaacaagtcctaagaatagg

SEQ ID NO: 12008 - DNA, 20 bp, synthetic construct
  misc_feature 1..20: note = Description of Artificial Sequence: Synthetic oligonucleotide
  misc_feature 1..20: note = Target: ANGPTL3; (-) strand; PAM type: YTN; PAM sequence: TTA
  source 1..20: mol_type = other DNA
gtctagaacaagtcctaaga

SEQ ID NO: 12009 - DNA, 20 bp, synthetic construct
  misc_feature 1..20: note = Description of Artificial Sequence: Synthetic oligonucleotide
  misc_feature 1..20: note = Target: ANGPTL3; (-) strand; PAM type: YTN; PAM sequence: TTT
  source 1..20: mol_type = other DNA
agtctagaacaagtcctaag

SEQ ID NO: 12010 - DNA, 20 bp, synthetic construct
  misc_feature 1..20: note = Description of Artificial Sequence: Synthetic oligonucleotide
  misc_feature 1..20: note = Target: ANGPTL3; (-) strand; PAM type: YTN; PAM sequence: TTT
  source 1..20: mol_type = other DNA
tagtctagaacaagtcctaa

SEQ ID NO: 12011 - DNA, 20 bp, synthetic construct
  misc_feature 1..20: note = Description of Artificial Sequence: Synthetic oligonucleotide
  misc_feature 1..20: note = Target: ANGPTL3; (-) strand; PAM type: YTN; PAM sequence: CTT
  source 1..20: mol_type = other DNA
ttagtctagaacaagtccta

SEQ ID NO: 12012 - DNA, 20 bp, synthetic construct
  misc_feature 1..20: note = Description of Artificial Sequence: Synthetic oligonucleotide
  misc_feature 1..20: note = Target: ANGPTL3; (-) strand; PAM type: YTN; PAM sequence: CTA
  source 1..20: mol_type = other DNA
tcttttagtctagaacaagt

SEQ ID NO: 12013 - DNA, 20 bp, synthetic construct
  misc_feature 1..20: note = Description of Artificial Sequence: Synthetic oligonucleotide
  misc_feature 1..20: note = Target: ANGPTL3; (-) strand; PAM type: YTN; PAM sequence: TTA
  source 1..20: mol_type = other DNA
actatcttttagtctagaac

SEQ ID NO: 12014 - DNA, 20 bp, synthetic construct
  misc_feature 1..20: note = Description of Artificial Sequence: Synthetic oligonucleotide
  misc_feature 1..20: note = Target: ANGPTL3; (-) strand; PAM type: YTN; PAM sequence: CTT
  source 1..20: mol_type = other DNA
aactatcttttagtctagaa

SEQ ID NO: 12015 - DNA, 20 bp, synthetic construct
  misc_feature 1..20: note = Description of Artificial Sequence: Synthetic oligonucleotide
  misc_feature 1..20: note = Target: ANGPTL3; (-) strand; PAM type: YTN; PAM sequence: CTC
  source 1..20: mol_type = other DNA
ttaactatcttttagtctag

SEQ ID NO: 12016 - DNA, 20 bp, synthetic construct
  misc_feature 1..20: note = Description of Artificial Sequence: Synthetic oligonucleotide
  misc_feature 1..20: note = Target: ANGPTL3; (-) strand; PAM type: YTN; PAM sequence: TTG
  source 1..20: mol_type = other DNA
atggatatctcttaactatc

SEQ ID NO: 12017 - DNA, 20 bp, synthetic construct
  misc_feature 1..20: note = Description of Artificial Sequence: Synthetic oligonucleotide
  misc_feature 1..20: note = Target: ANGPTL3; (-) strand; PAM type: YTN; PAM sequence: TTT
  source 1..20: mol_type = other DNA
gatggatatctcttaactat

SEQ ID NO: 12018 - DNA, 20 bp, synthetic construct
  misc_feature 1..20: note = Description of Artificial Sequence: Synthetic oligonucleotide
  misc_feature 1..20: note = Target: ANGPTL3; (-) strand; PAM type: YTN; PAM sequence: TTG
  source 1..20: mol_type = other DNA
tatttgatggatatctctta

SEQ ID NO: 12019 - DNA, 20 bp, synthetic construct
  misc_feature 1..20: note = Description of Artificial Sequence: Synthetic oligonucleotide
  misc_feature 1..20: note = Target: ANGPTL3; (-) strand; PAM type: YTN; PAM sequence: TTG
  source 1..20: mol_type = other DNA
atacattgtatttgatggat

SEQ ID NO: 12020 - DNA, 20 bp, synthetic construct
  misc_feature 1..20: note = Description of Artificial Sequence: Synthetic oligonucleotide
  misc_feature 1..20: note = Target: ANGPTL3; (-) strand; PAM type: YTN; PAM sequence: TTA
  source 1..20: mol_type = other DNA
ggttgatacattgtatttga

SEQ ID NO: 12021 - DNA, 20 bp, synthetic construct
  misc_feature 1..20: note = Description of Artificial Sequence: Synthetic oligonucleotide
  misc_feature 1..20: note = Target: ANGPTL3; (-) strand; PAM type: YTN; PAM sequence: TTT
  source 1..20: mol_type = other DNA
aggttgatacattgtatttg

SEQ ID NO: 12022 - DNA, 20 bp, synthetic construct
  misc_feature 1..20: note = Description of Artificial Sequence: Synthetic oligonucleotide
  misc_feature 1..20: note = Target: ANGPTL3; (-) strand; PAM type: YTN; PAM sequence: TTA
  source 1..20: mol_type = other DNA
tagggtgtaaaaagaacccc

SEQ ID NO: 12023 - DNA, 20 bp, synthetic construct
  misc_feature 1..20: note = Description of Artificial Sequence: Synthetic oligonucleotide
  misc_feature 1..20: note = Target: ANGPTL3; (-) strand; PAM type: YTN; PAM sequence: TTT
  source 1..20: mol_type = other DNA
atagggtgtaaaaagaaccc

SEQ ID NO: 12024 - DNA, 20 bp, synthetic construct
  misc_feature 1..20: note = Description of Artificial Sequence: Synthetic oligonucleotide
  misc_feature 1..20: note = Target: ANGPTL3; (-) strand; PAM type: YTN; PAM sequence: TTT
  source 1..20: mol_type = other DNA
tatagggtgtaaaaagaacc

SEQ ID NO: 12025 - DNA, 20 bp, synthetic construct
  misc_feature 1..20: note = Description of Artificial Sequence: Synthetic oligonucleotide
  misc_feature 1..20: note = Target: ANGPTL3; (-) strand; PAM type: YTN; PAM sequence: CTT
  source 1..20: mol_type = other DNA
ttatagggtgtaaaaagaac

SEQ ID NO: 12026 - DNA, 20 bp, synthetic construct
  misc_feature 1..20: note = Description of Artificial Sequence: Synthetic oligonucleotide
  misc_feature 1..20: note = Target: ANGPTL3; (-) strand; PAM type: YTN; PAM sequence: TTA
  source 1..20: mol_type = other DNA
ggtatgtcttttatagggtg

SEQ ID NO: 12027 - DNA, 20 bp, synthetic construct
  misc_feature 1..20: note = Description of Artificial Sequence: Synthetic oligonucleotide
  misc_feature 1..20: note = Target: ANGPTL3; (-) strand; PAM type: YTN; PAM sequence: CTT
  source 1..20: mol_type = other DNA
aggtatgtcttttatagggt

SEQ ID NO: 12028 - DNA, 20 bp, synthetic construct
  misc_feature 1..20: note = Description of Artificial Sequence: Synthetic oligonucleotide
  misc_feature 1..20: note = Target: ANGPTL3; (-) strand; PAM type: YTN; PAM sequence: TTG
  source 1..20: mol_type = other DNA
tcttaggtatgtcttttata

SEQ ID NO: 12029 - DNA, 20 bp, synthetic construct
  misc_feature 1..20: note = Description of Artificial Sequence: Synthetic oligonucleotide
  misc_feature 1..20: note = Target: ANGPTL3; (-) strand; PAM type: YTN; PAM sequence: CTG
  source 1..20: mol_type = other DNA
attgtcttaggtatgtcttt

SEQ ID NO: 12030 - DNA, 20 bp, synthetic construct
  misc_feature 1..20: note = Description of Artificial Sequence: Synthetic oligonucleotide
  misc_feature 1..20: note = Target: ANGPTL3; (-) strand; PAM type: YTN; PAM sequence: CTC
  source 1..20: mol_type = other DNA
tgattgtcttaggtatgtct

SEQ ID NO: 12031 - DNA, 20 bp, synthetic construct
  misc_feature 1..20: note = Description of Artificial Sequence: Synthetic oligonucleotide
  misc_feature 1..20: note = Target: ANGPTL3; (-) strand; PAM type: YTN; PAM sequence: TTC
  source 1..20: mol_type = other DNA
tctgattgtcttaggtatgt

SEQ ID NO: 12032 - DNA, 20 bp, synthetic construct
  misc_feature 1..20: note = Description of Artificial Sequence: Synthetic oligonucleotide
  misc_feature 1..20: note = Target: ANGPTL3; (-) strand; PAM type: YTN; PAM sequence: TTT
  source 1..20: mol_type = other DNA
ctctgattgtcttaggtatg

SEQ ID NO: 12033 - DNA, 20 bp, synthetic construct
  misc_feature 1..20: note = Description of Artificial Sequence: Synthetic oligonucleotide
  misc_feature 1..20: note = Target: ANGPTL3; (-) strand; PAM type: YTN; PAM sequence: TTG
  source 1..20: mol_type = other DNA
tatttctctgattgtcttag

SEQ ID NO: 12034 - DNA, 20 bp, synthetic construct
  misc_feature 1..20: note = Description of Artificial Sequence: Synthetic oligonucleotide
  misc_feature 1..20: note = Target: ANGPTL3; (-) strand; PAM type: YTN; PAM sequence: TTT
  source 1..20: mol_type = other DNA
gtatttctctgattgtctta

SEQ ID NO: 12035 - DNA, 20 bp, synthetic construct
  misc_feature 1..20: note = Description of Artificial Sequence: Synthetic oligonucleotide
  misc_feature 1..20: note = Target: ANGPTL3; (-) strand; PAM type: YTN; PAM sequence: CTA
  source 1..20: mol_type = other DNA
ataatcaagtccatatttgt

SEQ ID NO: 12036 - DNA, 20 bp, synthetic construct
  misc_feature 1..20: note = Description of Artificial Sequence: Synthetic oligonucleotide
  misc_feature 1..20: note = Target: ANGPTL3; (-) strand; PAM type: YTN; PAM sequence: TTA
  source 1..20: mol_type = other DNA
tctaataatcaagtccatat

SEQ ID NO: 12037 - DNA, 20 bp, synthetic construct
  misc_feature 1..20: note = Description of Artificial Sequence: Synthetic oligonucleotide
  misc_feature 1..20: note = Target: ANGPTL3; (-) strand; PAM type: YTN; PAM sequence: CTA
  source 1..20: mol_type = other DNA
tattatctaataatcaagtc

SEQ ID NO: 12038 - DNA, 20 bp, synthetic construct
  misc_feature 1..20: note = Description of Artificial Sequence: Synthetic oligonucleotide
  misc_feature 1..20: note = Target: ANGPTL3; (-) strand; PAM type: YTN; PAM sequence: TTC
  source 1..20: mol_type = other DNA
tatattatctaataatcaag

SEQ ID NO: 12039 - DNA, 20 bp, synthetic construct
  misc_feature 1..20: note = Description of Artificial Sequence: Synthetic oligonucleotide
  misc_feature 1..20: note = Target: ANGPTL3; (-) strand; PAM type: YTN; PAM sequence: CTT
  source 1..20: mol_type = other DNA
ctatattatctaataatcaa

SEQ ID NO: 12040 - DNA, 20 bp, synthetic construct
  misc_feature 1..20: note = Description of Artificial Sequence: Synthetic oligonucleotide
  misc_feature 1..20: note = Target: ANGPTL3; (-) strand; PAM type: YTN; PAM sequence: TTA
  source 1..20: mol_type = other DNA
ataaaccttctatattatct

SEQ ID NO: 12041 - DNA, 20 bp, synthetic construct
  misc_feature 1..20: note = Description of Artificial Sequence: Synthetic oligonucleotide
  misc_feature 1..20: note = Target: ANGPTL3; (-) strand; PAM type: YTN; PAM sequence: CTA
  source 1..20: mol_type = other DNA
agaaaattaataaaccttct

SEQ ID NO: 12042 - DNA, 20 bp, synthetic construct
  misc_feature 1..20: note = Description of Artificial Sequence: Synthetic oligonucleotide
  misc_feature 1..20: note = Target: ANGPTL3; (-) strand; PAM type: YTN; PAM sequence: CTG
  source 1..20: mol_type = other DNA
caataccatgatcacatcta

SEQ ID NO: 12043 - DNA, 20 bp, synthetic construct
  misc_feature 1..20: note = Description of Artificial Sequence: Synthetic oligonucleotide
  misc_feature 1..20: note = Target: ANGPTL3; (-) strand; PAM type: YTN; PAM sequence: TTA
  source 1..20: mol_type = other DNA
aaactgcaataccatgatca

SEQ ID NO: 12044 - DNA, 20 bp, synthetic construct
  misc_feature 1..20: note = Description of Artificial Sequence: Synthetic oligonucleotide
  misc_feature 1..20: note = Target: ANGPTL3; (-) strand; PAM type: YTN; PAM sequence: TTT
  source 1..20: mol_type = other DNA
aaaactgcaataccatgatc

SEQ ID NO: 12045 - DNA, 20 bp, synthetic construct
  misc_feature 1..20: note = Description of Artificial Sequence: Synthetic oligonucleotide
  misc_feature 1..20: note = Target: ANGPTL3; (-) strand; PAM type: YTN; PAM sequence: CTT
  source 1..20: mol_type = other DNA
taaaactgcaataccatgat

SEQ ID NO: 12046 - DNA, 20 bp, synthetic construct
  misc_feature 1..20: note = Description of Artificial Sequence: Synthetic oligonucleotide
  misc_feature 1..20: note = Target: ANGPTL3; (-) strand; PAM type: YTN; PAM sequence: CTC
  source 1..20: mol_type = other DNA
ctttaaaactgcaataccat

SEQ ID NO: 12047 - DNA, 20 bp, synthetic construct
  misc_feature 1..20: note = Description of Artificial Sequence: Synthetic oligonucleotide
  misc_feature 1..20: note = Target: ANGPTL3; (-) strand; PAM type: YTN; PAM sequence: TTC
  source 1..20: mol_type = other DNA
tcctttaaaactgcaatacc

SEQ ID NO: 12048 - DNA, 20 bp, synthetic construct
  misc_feature 1..20: note = Description of Artificial Sequence: Synthetic oligonucleotide
  misc_feature 1..20: note = Target: ANGPTL3; (-) strand; PAM type: YTN; PAM sequence: TTG
  source 1..20: mol_type = other DNA
ttctcctttaaaactgcaat

SEQ ID NO: 12049 - DNA, 20 bp, synthetic construct
  misc_feature 1..20: note = Description of Artificial Sequence: Synthetic oligonucleotide
  misc_feature 1..20: note = Target: ANGPTL3; (-) strand; PAM type: YTN; PAM sequence: TTA
  source 1..20: mol_type = other DNA
aacaggagattgttctcctt

SEQ ID NO: 12050 - DNA, 20 bp, synthetic construct
  misc_feature 1..20: note = Description of Artificial Sequence: Synthetic oligonucleotide
  misc_feature 1..20: note = Target: ANGPTL3; (-) strand; PAM type: YTN; PAM sequence: CTT
  source 1..20: mol_type = other DNA
aaacaggagattgttctcct

SEQ ID NO: 12051 - DNA, 20 bp, synthetic construct
  misc_feature 1..20: note = Description of Artificial Sequence: Synthetic oligonucleotide
  misc_feature 1..20: note = Target: ANGPTL3; (-) strand; PAM type: YTN; PAM sequence: CTC
  source 1..20: mol_type = other DNA
ttaaacaggagattgttctc

SEQ ID NO: 12052 - DNA, 20 bp, synthetic construct
  misc_feature 1..20: note = Description of Artificial Sequence: Synthetic oligonucleotide
  misc_feature 1..20: note = Target: ANGPTL3; (-) strand; PAM type: YTN; PAM sequence: TTC
  source 1..20: mol_type = other DNA
agcatgtatctcttaaacag

SEQ ID NO: 12053 - DNA, 20 bp, synthetic construct
  misc_feature 1..20: note = Description of Artificial Sequence: Synthetic oligonucleotide
  misc_feature 1..20: note = Target: ANGPTL3; (-) strand; PAM type: YTN; PAM sequence: TTT
  source 1..20: mol_type = other DNA
cagcatgtatctcttaaaca

SEQ ID NO: 12054 - DNA, 20 bp, synthetic construct
  misc_feature 1..20: note = Description of Artificial Sequence: Synthetic oligonucleotide
  misc_feature 1..20: note = Target: ANGPTL3; (-) strand; PAM type: YTN; PAM sequence: CTC
  source 1..20: mol_type = other DNA
cgtaaatatttcagcatgta

SEQ ID NO: 12055 - DNA, 20 bp, synthetic construct
  misc_feature 1..20: note = Description of Artificial Sequence: Synthetic oligonucleotide
  misc_feature 1..20: note = Target: ANGPTL3; (-) strand; PAM type: YTN; PAM sequence: TTA
  source 1..20: mol_type = other DNA
actccgtaaatatttcagca

SEQ ID NO: 12056 - DNA, 20 bp, synthetic construct
  misc_feature 1..20: note = Description of Artificial Sequence: Synthetic oligonucleotide
  misc_feature 1..20: note = Target: ANGPTL3; (-) strand; PAM type: YTN; PAM sequence: TTT
  source 1..20: mol_type = other DNA
aactccgtaaatatttcagc

SEQ ID NO: 12057 - DNA, 20 bp, synthetic construct
  misc_feature 1..20: note = Description of Artificial Sequence: Synthetic oligonucleotide
  misc_feature 1..20: note = Target: ANGPTL3; (-) strand; PAM type: YTN; PAM sequence: CTT
  source 1..20: mol_type = other DNA
taactccgtaaatatttcag

SEQ ID NO: 12058 - DNA, 20 bp, synthetic construct
  misc_feature 1..20: note = Description of Artificial Sequence: Synthetic oligonucleotide
  misc_feature 1..20: note = Target: ANGPTL3; (-) strand; PAM type: YTN; PAM sequence: CTG
  source 1..20: mol_type = other DNA
gagtccagtgacctttaact

SEQ ID NO: 12059 - DNA, 20 bp, synthetic construct
  misc_feature 1..20: note = Description of Artificial Sequence: Synthetic oligonucleotide
  misc_feature 1..20: note = Target: ANGPTL3; (-) strand; PAM type: YTN; PAM sequence: CTA
  source 1..20: mol_type = other DNA
tcaccagtctggagtccagt

SEQ ID NO: 12060 - DNA, 20 bp, synthetic construct
  misc_feature 1..20: note = Description of Artificial Sequence: Synthetic oligonucleotide
  misc_feature 1..20: note = Target: ANGPTL3; (-) strand; PAM type: YTN; PAM sequence: TTC
  source 1..20: mol_type = other DNA
tatcaccagtctggagtcca

SEQ ID NO: 12061 - DNA, 20 bp, synthetic construct
  misc_feature 1..20: note = Description of Artificial Sequence: Synthetic oligonucleotide
  misc_feature 1..20: note = Target: ANGPTL3; (-) strand; PAM type: YTN; PAM sequence: TTG
  source 1..20: mol_type = other DNA
ttctatcaccagtctggagt

SEQ ID NO: 12062 - DNA, 20 bp, synthetic construct
  misc_feature 1..20: note = Description of Artificial Sequence: Synthetic oligonucleotide
  misc_feature 1..20: note = Target: ANGPTL3; (-) strand; PAM type: YTN; PAM sequence: CTT
  source 1..20: mol_type = other DNA
gttctatcaccagtctggag

SEQ ID NO: 12063 - DNA, 20 bp, synthetic construct
  misc_feature 1..20: note = Description of Artificial Sequence: Synthetic oligonucleotide
  misc_feature 1..20: note = Target: ANGPTL3; (-) strand; PAM type: YTN; PAM sequence: TTA
  source 1..20: mol_type = other DNA
gagacagagtcttgttctat

SEQ ID NO: 12064 - DNA, 20 bp, synthetic construct
  misc_feature 1..20: note = Description of Artificial Sequence: Synthetic oligonucleotide
  misc_feature 1..20: note = Target: ANGPTL3; (-) strand; PAM type: YTN; PAM sequence: TTT
  source 1..20: mol_type = other DNA
agagacagagtcttgttcta

SEQ ID NO: 12065 - DNA, 20 bp, synthetic construct
  misc_feature 1..20: note = Description of Artificial Sequence: Synthetic oligonucleotide
  misc_feature 1..20: note = Target: ANGPTL3; (-) strand; PAM type: YTN; PAM sequence: TTT
  source 1..20: mol_type = other DNA
tagagacagagtcttgttct

SEQ ID NO: 12066 - DNA, 20 bp, synthetic construct
  misc_feature 1..20: note = Description of Artificial Sequence: Synthetic oligonucleotide
  misc_feature 1..20: note = Target: ANGPTL3; (-) strand; PAM type: YTN; PAM sequence: TTT
  source 1..20: mol_type = other DNA
ttagagacagagtcttgttc

SEQ ID NO: 12067 - DNA, 20 bp, synthetic construct
  misc_feature 1..20: note = Description of Artificial Sequence: Synthetic oligonucleotide
  misc_feature 1..20: note = Target: ANGPTL3; (-) strand; PAM type: YTN; PAM sequence: TTT
  source 1..20: mol_type = other DNA
tttagagacagagtcttgtt

SEQ ID NO: 12068 - DNA, 20 bp, synthetic construct
  misc_feature 1..20: note = Description of Artificial Sequence: Synthetic oligonucleotide
  misc_feature 1..20: note = Target: ANGPTL3; (-) strand; PAM type: YTN; PAM sequence: TTA
  source 1..20: mol_type = other DNA
ttttttagagacagagtctt

SEQ ID NO: 12069 - DNA, 20 bp, synthetic construct
  misc_feature 1..20: note = Description of Artificial Sequence: Synthetic oligonucleotide
  misc_feature 1..20: note = Target: ANGPTL3; (-) strand; PAM type: YTN; PAM sequence: TTA
  source 1..20: mol_type = other DNA
attattttttagagacagag

SEQ ID NO: 12070 - DNA, 20 bp, synthetic construct
  misc_feature 1..20: note = Description of Artificial Sequence: Synthetic oligonucleotide
  misc_feature 1..20: note = Target: ANGPTL3; (-) strand; PAM type: YTN; PAM sequence: TTA
  source 1..20: mol_type = other DNA
aaaaattaattattttttag

SEQ ID NO: 12071 - DNA, 20 bp, synthetic construct
  misc_feature 1..20: note = Description of Artificial Sequence: Synthetic oligonucleotide
  misc_feature 1..20: note = Target: ANGPTL3; (-) strand; PAM type: YTN; PAM sequence: TTT
  source 1..20: mol_type = other DNA
aaaaaattaattatttttta

SEQ ID NO: 12072 - DNA, 20 bp, synthetic construct
  misc_feature 1..20: note = Description of Artificial Sequence: Synthetic oligonucleotide
  misc_feature 1..20: note = Target: ANGPTL3; (-) strand; PAM type: YTN; PAM sequence: TTT
  source 1..20: mol_type = other DNA
taaaaaattaattatttttt

SEQ ID NO: 12073 - DNA, 20 bp, synthetic construct
  misc_feature 1..20: note = Description of Artificial Sequence: Synthetic oligonucleotide
  misc_feature 1..20: note = Target: ANGPTL3; (-) strand; PAM type: YTN; PAM sequence: CTT
  source 1..20: mol_type = other DNA
ttaaaaaattaattattttt

SEQ ID NO: 12074 - DNA, 20 bp, synthetic construct
  misc_feature 1..20: note = Description of Artificial Sequence: Synthetic oligonucleotide
  misc_feature 1..20: note = Target: ANGPTL3; (-) strand; PAM type: YTN; PAM sequence: TTC
  source 1..20: mol_type = other DNA
ttttaaaaaattaattattt

SEQ ID NO: 12075 - DNA, 20 bp, synthetic construct
  misc_feature 1..20: note = Description of Artificial Sequence: Synthetic oligonucleotide
  misc_feature 1..20: note = Target: ANGPTL3; (-) strand; PAM type: YTN; PAM sequence: TTT
  source 1..20: mol_type = other DNA
cttttaaaaaattaattatt

SEQ ID NO: 12076 - DNA, 20 bp, synthetic construct
  misc_feature 1..20: note = Description of Artificial Sequence: Synthetic oligonucleotide
  misc_feature 1..20: note = Target: ANGPTL3; (-) strand; PAM type: YTN; PAM sequence: TTT
  source 1..20: mol_type = other DNA
tcttttaaaaaattaattat

SEQ ID NO: 12077 - DNA, 20 bp, synthetic construct
  misc_feature 1..20: note = Description of Artificial Sequence: Synthetic oligonucleotide
  misc_feature 1..20: note = Target: ANGPTL3; (-) strand; PAM type: YTN; PAM sequence: CTA
  source 1..20: mol_type = other DNA
ttttcttttaaaaaattaat

SEQ ID NO: 12078 - DNA, 20 bp, synthetic construct
  misc_feature 1..20: note = Description of Artificial Sequence: Synthetic oligonucleotide
  misc_feature 1..20: note = Target: ANGPTL3; (-) strand; PAM type: YTN; PAM sequence: TTA
  source 1..20: mol_type = other DNA
ccaaactattttcttttaaa

SEQ ID NO: 12079 - DNA, 20 bp, synthetic construct
  misc_feature 1..20: note = Description of Artificial Sequence: Synthetic oligonucleotide
  misc_feature 1..20: note = Target: ANGPTL3; (-) strand; PAM type: YTN; PAM sequence: CTT
  source 1..20: mol_type = other DNA
accaaactattttcttttaa

SEQ ID NO: 12080 - DNA, 20 bp, synthetic construct
  misc_feature 1..20: note = Description of Artificial Sequence: Synthetic oligonucleotide
  misc_feature 1..20: note = Target: ANGPTL3; (-) strand; PAM type: YTN; PAM sequence: TTA
  source 1..20: mol_type = other DNA
agaatgtaagaatcatctta

SEQ ID NO: 12081 - DNA, 20 bp, synthetic construct
  misc_feature 1..20: note = Description of Artificial Sequence: Synthetic oligonucleotide
  misc_feature 1..20: note = Target: ANGPTL3; (-) strand; PAM type: YTN; PAM sequence: TTT
  source 1..20: mol_type = other DNA
aagaatgtaagaatcatctt

SEQ ID NO: 12082 - DNA, 20 bp, synthetic construct
  misc_feature 1..20: note = Description of Artificial Sequence: Synthetic oligonucleotide
  misc_feature 1..20: note = Target: ANGPTL3; (-) strand; PAM type: YTN; PAM sequence: TTA
  source 1..20: mol_type = other DNA
tttaagaatgtaagaatcat

SEQ ID NO: 12083 - DNA, 20 bp, synthetic construct
  misc_feature 1..20: note = Description of Artificial Sequence: Synthetic oligonucleotide
  misc_feature 1..20: note = Target: ANGPTL3; (-) strand; PAM type: YTN; PAM sequence: TTA
  source 1..20: mol_type = other DNA
gatggcgtgttatttaagaa

SEQ ID NO: 12084 - DNA, 20 bp, synthetic construct
  misc_feature 1..20: note = Description of Artificial Sequence: Synthetic oligonucleotide
  misc_feature 1..20: note = Target: ANGPTL3; (-) strand; PAM type: YTN; PAM sequence: CTT
  source 1..20: mol_type = other DNA
agatggcgtgttatttaaga

SEQ ID NO: 12085 - DNA, 20 bp, synthetic construct
  misc_feature 1..20: note = Description of Artificial Sequence: Synthetic oligonucleotide
  misc_feature 1..20: note = Target: ANGPTL3; (-) strand; PAM type: YTN; PAM sequence: TTC
  source 1..20: mol_type = other DNA
ttagatggcgtgttatttaa

SEQ ID NO: 12086 - DNA, 20 bp, synthetic construct
  misc_feature 1..20: note = Description of Artificial Sequence: Synthetic oligonucleotide
  misc_feature 1..20: note = Target: ANGPTL3; (-) strand; PAM type: YTN; PAM sequence: TTT
  source 1..20: mol_type = other DNA
cttagatggcgtgttattta

SEQ ID NO: 12087 - DNA, 20 bp, synthetic construct
  misc_feature 1..20: note = Description of Artificial Sequence: Synthetic oligonucleotide
  misc_feature 1..20: note = Target: ANGPTL3; (-) strand; PAM type: YTN; PAM sequence: TTT
  source 1..20: mol_type = other DNA
tcttagatggcgtgttattt

SEQ ID NO: 12088 - DNA, 20 bp, synthetic construct
  misc_feature 1..20: note = Description of Artificial Sequence: Synthetic oligonucleotide
  misc_feature 1..20: note = Target: ANGPTL3; (-) strand; PAM type: YTN; PAM sequence: TTT
  source 1..20: mol_type = other DNA
ttcttagatggcgtgttatt

SEQ ID NO: 12089 - DNA, 20 bp, synthetic construct
  misc_feature 1..20: note = Description of Artificial Sequence: Synthetic oligonucleotide
  misc_feature 1..20: note = Target: ANGPTL3; (-) strand; PAM type: YTN; PAM sequence: TTA
  source 1..20: mol_type = other DNA
aagcatttttcttagatggc

SEQ ID NO: 12090 - DNA, 20 bp, synthetic construct
  misc_feature 1..20: note = Description of Artificial Sequence: Synthetic oligonucleotide
  misc_feature 1..20: note = Target: ANGPTL3; (-) strand; PAM type: YTN; PAM sequence: TTA
  source 1..20: mol_type = other DNA
tgttaaagcatttttcttag

SEQ ID NO: 12091 - DNA, 20 bp, synthetic construct
  misc_feature 1..20: note = Description of Artificial Sequence: Synthetic oligonucleotide
  misc_feature 1..20: note = Target: ANGPTL3; (-) strand; PAM type: YTN; PAM sequence: TTT
  source 1..20: mol_type = other DNA
atgttaaagcatttttctta

SEQ ID NO: 12092 - DNA, 20 bp, synthetic construct
  misc_feature 1..20: note = Description of Artificial Sequence: Synthetic oligonucleotide
  misc_feature 1..20: note = Target: ANGPTL3; (-) strand; PAM type: YTN; PAM sequence: TTC
  source 1..20: mol_type = other DNA
agtaatgtttatgttaaagc

SEQ ID NO: 12093 - DNA, 20 bp, synthetic construct
  misc_feature 1..20: note = Description of Artificial Sequence: Synthetic oligonucleotide
  misc_feature 1..20: note = Target: ANGPTL3; (-) strand; PAM type: YTN; PAM sequence: TTT
  source 1..20: mol_type = other DNA
cagtaatgtttatgttaaag

SEQ ID NO: 12094 - DNA, 20 bp, synthetic construct
  misc_feature 1..20: note = Description of Artificial Sequence: Synthetic oligonucleotide
  misc_feature 1..20: note = Target: ANGPTL3; (-) strand; PAM type: YTN; PAM sequence: TTT
  source 1..20: mol_type = other DNA
tcagtaatgtttatgttaaa

SEQ ID NO: 12095 - DNA, 20 bp, synthetic construct
  misc_feature 1..20: note = Description of Artificial Sequence: Synthetic oligonucleotide
  misc_feature 1..20: note = Target: ANGPTL3; (-) strand; PAM type: YTN; PAM sequence: TTT
  source 1..20: mol_type = other DNA
ttcagtaatgtttatgttaa

SEQ ID NO: 12096 - DNA, 20 bp, synthetic construct
  misc_feature 1..20: note = Description of Artificial Sequence: Synthetic oligonucleotide
  misc_feature 1..20: note = Target: ANGPTL3; (-) strand; PAM type: YTN; PAM sequence: TTT
  source 1..20: mol_type = other DNA
tttcagtaatgtttatgtta

SEQ ID NO: 12097 - DNA, 20 bp, synthetic construct
  misc_feature 1..20: note = Description of Artificial Sequence: Synthetic oligonucleotide
  misc_feature 1..20: note = Target: ANGPTL3; (-) strand; PAM type: YTN; PAM sequence: TTG
  source 1..20: mol_type = other DNA
tggcaaatgtagcatttttt

SEQ ID NO: 12098 - DNA, 20 bp, synthetic construct
  misc_feature 1..20: note = Description of Artificial Sequence: Synthetic oligonucleotide
  misc_feature 1..20: note = Target: ANGPTL3; (-) strand; PAM type: YTN; PAM sequence: TTA
  source 1..20: mol_type = other DNA
tgaagttgtggcaaatgtag

SEQ ID NO: 12099 - DNA, 20 bp, synthetic construct
  misc_feature 1..20: note = Description of Artificial Sequence: Synthetic oligonucleotide
  misc_feature 1..20: note = Target: ANGPTL3; (-) strand; PAM type: YTN; PAM sequence: TTT
  source 1..20: mol_type = other DNA
atgaagttgtggcaaatgta

SEQ ID NO: 12100 - DNA, 20 bp, synthetic construct
  misc_feature 1..20: note = Description of Artificial Sequence: Synthetic oligonucleotide
  misc_feature 1..20: note = Target: ANGPTL3; (-) strand; PAM type: YTN; PAM sequence: TTT
  source 1..20: mol_type = other DNA
tatgaagttgtggcaaatgt

SEQ ID NO: 12101 - DNA, 20 bp, synthetic construct
  misc_feature 1..20: note = Description of Artificial Sequence: Synthetic oligonucleotide
  misc_feature 1..20: note = Target: ANGPTL3; (-) strand; PAM type: YTN; PAM sequence: TTG
  source 1..20: mol_type = other DNA
acattttatgaagttgtggc

SEQ ID NO: 12102 - DNA, 20 bp, synthetic construct
  misc_feature 1..20: note = Description of Artificial Sequence: Synthetic oligonucleotide
  misc_feature 1..20: note = Target: ANGPTL3; (-) strand; PAM type: YTN; PAM sequence: CTT
  source 1..20: mol_type = other DNA
gacattttatgaagttgtgg

SEQ ID NO: 12103 - DNA, 20 bp, synthetic construct
  misc_feature 1..20: note = Description of Artificial Sequence: Synthetic oligonucleotide
  misc_feature 1..20: note = Target: ANGPTL3; (-) strand; PAM type: YTN; PAM sequence: TTC
  source 1..20: mol_type = other DNA
acttgacattttatgaagtt

SEQ ID NO: 12104 - DNA, 20 bp, synthetic construct
  misc_feature 1..20: note = Description of Artificial Sequence: Synthetic oligonucleotide
  misc_feature 1..20: note = Target: ANGPTL3; (-) strand; PAM type: YTN; PAM sequence: TTT
  source 1..20: mol_type = other DNA
cacttgacattttatgaagt

SEQ ID NO: 12105 - DNA, 20 bp, synthetic construct
  misc_feature 1..20: note = Description of Artificial Sequence: Synthetic oligonucleotide
  misc_feature 1..20: note = Target: ANGPTL3; (-) strand; PAM type: YTN; PAM sequence: TTG
  source 1..20: mol_type = other DNA
agatttcacttgacatttta

SEQ ID NO: 12106 - DNA, 20 bp, synthetic construct
  misc_feature 1..20: note = Description of Artificial Sequence: Synthetic oligonucleotide
  misc_feature 1..20: note = Target: ANGPTL3; (-) strand; PAM type: YTN; PAM sequence: CTT
  source 1..20: mol_type = other DNA
gagatttcacttgacatttt

SEQ ID NO: 12107 - DNA, 20 bp, synthetic construct
  misc_feature 1..20: note = Description of Artificial Sequence: Synthetic oligonucleotide
  misc_feature 1..20: note = Target: ANGPTL3; (-) strand; PAM type: YTN; PAM sequence: TTG
  source 1..20: mol_type = other DNA
gagcttgagatttcacttga

SEQ ID NO: 12108 - DNA, 20 bp, synthetic construct
  misc_feature 1..20: note = Description of Artificial Sequence: Synthetic oligonucleotide
  misc_feature 1..20: note = Target: ANGPTL3; (-) strand; PAM type: YTN; PAM sequence: TTT
  source 1..20: mol_type = other DNA
ggagcttgagatttcacttg

SEQ ID NO: 12109 - DNA, 20 bp, synthetic construct
  misc_feature 1..20: note = Description of Artificial Sequence: Synthetic oligonucleotide
  misc_feature 1..20: note = Target: ANGPTL3; (-) strand; PAM type: YTN; PAM sequence: CTT
  source 1..20: mol_type = other DNA
tggagcttgagatttcactt

SEQ ID NO: 12110 - DNA, 20 bp, synthetic construct
  misc_feature 1..20: note = Description of Artificial Sequence: Synthetic oligonucleotide
  misc_feature 1..20: note = Target: ANGPTL3; (-) strand; PAM type: YTN; PAM sequence: TTA
  source 1..20: mol_type = other DNA
gtaataggaataatatcttt

SEQ ID NO: 12111 - DNA, 20 bp, synthetic construct
  misc_feature 1..20: note = Description of Artificial Sequence: Synthetic oligonucleotide
  misc_feature 1..20: note = Target: ANGPTL3; (-) strand; PAM type: YTN; PAM sequence: TTT
  source 1..20: mol_type = other DNA
agtaataggaataatatctt

SEQ ID NO: 12112 - DNA, 20 bp, synthetic construct
  misc_feature 1..20: note = Description of Artificial Sequence: Synthetic oligonucleotide
  misc_feature 1..20: note = Target: ANGPTL3; (-) strand; PAM type: YTN; PAM sequence: TTA
  source 1..20: mol_type = other DNA
catcagatttagtaatagga

SEQ ID NO: 12113 - DNA, 20 bp, synthetic construct
  misc_feature 1..20: note = Description of Artificial Sequence: Synthetic oligonucleotide
  misc_feature 1..20: note = Target: ANGPTL3; (-) strand; PAM type: YTN; PAM sequence: TTA
  source 1..20: mol_type = other DNA
ttacatcagatttagtaata

SEQ ID NO: 12114 - DNA, 20 bp, synthetic construct
  misc_feature 1..20: note = Description of Artificial Sequence: Synthetic oligonucleotide
  misc_feature 1..20: note = Target: ANGPTL3; (-) strand; PAM type: YTN; PAM sequence: CTA
  source 1..20: mol_type = other DNA
gaatcaataaaatgttatta

SEQ ID NO: 12115 - DNA, 20 bp, synthetic construct
  misc_feature 1..20: note = Description of Artificial Sequence: Synthetic oligonucleotide
  misc_feature 1..20: note = Target: ANGPTL3; (-) strand; PAM type: YTN; PAM sequence: TTC
  source 1..20: mol_type = other DNA
agcaggaatgcctagaatca

SEQ ID NO: 12116 - DNA, 20 bp, synthetic construct
  misc_feature 1..20: note = Description of Artificial Sequence: Synthetic oligonucleotide
  misc_feature 1..20: note = Target: ANGPTL3; (-) strand; PAM type: YTN; PAM sequence: TTA
  source 1..20: mol_type = other DNA
taaatggtggtacattcagc

SEQ ID NO: 12117 - DNA, 20 bp, synthetic construct
  misc_feature 1..20: note = Description of Artificial Sequence: Synthetic oligonucleotide
  misc_feature 1..20: note = Target: ANGPTL3; (-) strand; PAM type: YTN; PAM sequence: CTG
  source 1..20: mol_type = other DNA
ttataaatggtggtacattc

SEQ ID NO: 12118 - DNA, 20 bp, synthetic construct
  misc_feature 1..20: note = Description of Artificial Sequence: Synthetic oligonucleotide
  misc_feature 1..20: note = Target: ANGPTL3; (-) strand; PAM type: YTN; PAM sequence: CTC
  source 1..20: mol_type = other DNA
tgttataaatggtggtacat

SEQ ID NO: 12119 - DNA, 20 bp, synthetic construct
  misc_feature 1..20: note = Description of Artificial Sequence: Synthetic oligonucleotide
  misc_feature 1..20: note = Target: ANGPTL3; (-) strand; PAM type: YTN; PAM sequence: TTC
  source 1..20: mol_type = other DNA
acctctgttataaatggtgg

SEQ ID NO: 12120 - DNA, 20 bp, synthetic construct
  misc_feature 1..20: note = Description of Artificial Sequence: Synthetic oligonucleotide
  misc_feature 1..20: note = Target: ANGPTL3; (-) strand; PAM type: YTN; PAM sequence: TTG
  source 1..20: mol_type = other DNA
tatgttcacctctgttataa

SEQ ID NO: 12121 - DNA, 20 bp, synthetic construct
  misc_feature 1..20: note = Description of Artificial Sequence: Synthetic oligonucleotide
  misc_feature 1..20: note = Target: ANGPTL3; (-) strand; PAM type: YTN; PAM sequence: CTT
  source 1..20: mol_type = other DNA
gtatgttcacctctgttata

SEQ ID NO: 12122 - DNA, 20 bp, synthetic construct
  misc_feature 1..20: note = Description of Artificial Sequence: Synthetic oligonucleotide
  misc_feature 1..20: note = Target: ANGPTL3; (-) strand; PAM type: YTN; PAM sequence: CTG
  source 1..20: mol_type = other DNA
atggcatacatgccacttgt

SEQ ID NO: 12123 - DNA, 20 bp, synthetic construct
  misc_feature 1..20: note = Description of Artificial Sequence: Synthetic oligonucleotide
  misc_feature 1..20: note = Target: ANGPTL3; (-) strand; PAM type: YTN; PAM sequence: CTG
  source 1..20: mol_type = other DNA
ggtctgatggcatacatgcc

SEQ ID NO: 12124 - DNA, 20 bp, synthetic construct
  misc_feature 1..20: note = Description of Artificial Sequence: Synthetic oligonucleotide
  misc_feature 1..20: note = Target: ANGPTL3; (-) strand; PAM type: YTN; PAM sequence: TTG
  source 1..20: mol_type = other DNA
ctgggtctgatggcatacat

SEQ ID NO: 12125 - DNA, 20 bp, synthetic construct
  misc_feature 1..20: note = Description of Artificial Sequence: Synthetic oligonucleotide
  misc_feature 1..20: note = Target: ANGPTL3; (-) strand; PAM type: YTN; PAM sequence: TTG
  source 1..20: mol_type = other DNA
agagttgctgggtctgatgg

SEQ ID NO: 12126 - DNA, 20 bp, synthetic construct
  misc_feature 1..20: note = Description of Artificial Sequence: Synthetic oligonucleotide
  misc_feature 1..20: note = Target: ANGPTL3; (-) strand; PAM type: YTN; PAM sequence: CTT
  source 1..20: mol_type = other DNA
gagagttgctgggtctgatg

SEQ ID NO: 12127 - DNA, 20 bp, synthetic construct
  misc_feature 1..20: note = Description of Artificial Sequence: Synthetic oligonucleotide
  misc_feature 1..20: note = Target: ANGPTL3; (-) strand; PAM type: YTN; PAM sequence: CTG
  source 1..20: mol_type = other DNA
atataacatcacagtagaca

SEQ ID NO: 12128 - DNA, 20 bp, synthetic construct
  misc_feature 1..20: note = Description of Artificial Sequence: Synthetic oligonucleotide
  misc_feature 1..20: note = Target: ANGPTL3; (-) strand; PAM type: YTN; PAM sequence: TTA
  source 1..20: mol_type = other DNA
cctgatataacatcacagta

SEQ ID NO: 12129 - DNA, 20 bp, synthetic construct
  misc_feature 1..20: note = Description of Artificial Sequence: Synthetic oligonucleotide
  misc_feature 1..20: note = Target: ANGPTL3; (-) strand; PAM type: YTN; PAM sequence: TTT
  source 1..20: mol_type = other DNA
acctgatataacatcacagt

SEQ ID NO: 12130 - DNA, 20 bp, synthetic construct
  misc_feature 1..20: note = Description of Artificial Sequence: Synthetic oligonucleotide
  misc_feature 1..20: note = Target: ANGPTL3; (-) strand; PAM type: YTN; PAM sequence: TTT
  source 1..20: mol_type = other DNA
tacctgatataacatcacag

SEQ ID NO: 12131 - DNA, 20 bp, synthetic construct
  misc_feature 1..20: note = Description of Artificial Sequence: Synthetic oligonucleotide
  misc_feature 1..20: note = Target: ANGPTL3; (-) strand; PAM type: YTN; PAM sequence: TTA
  source 1..20: mol_type = other DNA
gacaggttttacctgatata

SEQ ID NO: 12132 - DNA, 20 bp, synthetic construct
  misc_feature 1..20: note = Description of Artificial Sequence: Synthetic oligonucleotide
  misc_feature 1..20: note = Target: ANGPTL3; (-) strand; PAM type: YTN; PAM sequence: CTT
  source 1..20: mol_type = other DNA
agacaggttttacctgatat

SEQ ID NO: 12133 - DNA, 20 bp, synthetic construct
  misc_feature 1..20: note = Description of Artificial Sequence: Synthetic oligonucleotide
  misc_feature 1..20: note = Target: ANGPTL3; (-) strand; PAM type: YTN; PAM sequence: CTC
  source 1..20: mol_type = other DNA
cttagacaggttttacctga

SEQ ID NO: 12134 - DNA, 20 bp, synthetic construct
  misc_feature 1..20: note = Description of Artificial Sequence: Synthetic oligonucleotide
  misc_feature 1..20: note = Target: ANGPTL3; (-) strand; PAM type: YTN; PAM sequence: TTC
  source 1..20: mol_type = other DNA
tccttagacaggttttacct

SEQ ID NO: 12135 - DNA, 20 bp, synthetic construct
  misc_feature 1..20: note = Description of Artificial Sequence: Synthetic oligonucleotide
  misc_feature 1..20: note = Target: ANGPTL3; (-) strand; PAM type: YTN; PAM sequence: CTA
  source 1..20: mol_type = other DNA
ttctccttagacaggtttta

SEQ ID NO: 12136 - DNA, 20 bp, synthetic construct
  misc_feature 1..20: note = Description of Artificial Sequence: Synthetic oligonucleotide
  misc_feature 1..20: note = Target: ANGPTL3; (-) strand; PAM type: YTN; PAM sequence: CTG
  source 1..20: mol_type = other DNA
tctattctccttagacaggt

SEQ ID NO: 12137 - DNA, 20 bp, synthetic construct
  misc_feature 1..20: note = Description of Artificial Sequence: Synthetic oligonucleotide
  misc_feature 1..20: note = Target: ANGPTL3; (-) strand; PAM type: YTN; PAM sequence: CTA
  source 1..20: mol_type = other DNA
ctgtctattctccttagaca

SEQ ID NO: 12138 - DNA, 20 bp, synthetic construct
  misc_feature 1..20: note = Description of Artificial Sequence: Synthetic oligonucleotide
  misc_feature 1..20: note = Target: ANGPTL3; (-) strand; PAM type: YTN; PAM sequence: CTA
  source 1..20: mol_type = other DNA
actactgtctattctcctta

SEQ ID NO: 12139 - DNA, 20 bp, synthetic construct
  misc_feature 1..20: note = Description of Artificial Sequence: Synthetic oligonucleotide
  misc_feature 1..20: note = Target: ANGPTL3; (-) strand; PAM type: YTN; PAM sequence: TTG
  source 1..20: mol_type = other DNA
aactaactactgtctattct

SEQ ID NO: 12140 - DNA, 20 bp, synthetic construct
  misc_feature 1..20: note = Description of Artificial Sequence: Synthetic oligonucleotide
  misc_feature 1..20: note = Target: ANGPTL3; (-) strand; PAM type: YTN; PAM sequence: CTA
  source 1..20: mol_type = other DNA
atacgtaatgagtaagttga

SEQ ID NO: 12141 - DNA, 20 bp, synthetic construct
  misc_feature 1..20: note = Description of Artificial Sequence: Synthetic oligonucleotide
  misc_feature 1..20: note = Target: ANGPTL3; (-) strand; PAM type: YTN; PAM sequence: TTC
  source 1..20: mol_type = other DNA
ctaatacgtaatgagtaagt

SEQ ID NO: 12142 - DNA, 20 bp, synthetic construct
  misc_feature 1..20: note = Description of Artificial Sequence: Synthetic oligonucleotide
  misc_feature 1..20: note = Target: ANGPTL3; (-) strand; PAM type: YTN; PAM sequence: CTT
  source 1..20: mol_type = other DNA
cctaatacgtaatgagtaag

SEQ ID NO: 12143 - DNA, 20 bp, synthetic construct
  misc_feature 1..20: note = Description of Artificial Sequence: Synthetic oligonucleotide
  misc_feature 1..20: note = Target: ANGPTL3; (-) strand; PAM type: YTN; PAM sequence: TTA
  source 1..20: mol_type = other DNA
atcttcctaatacgtaatga

SEQ ID NO: 12144 - DNA, 20 bp, synthetic construct
  misc_feature 1..20: note = Description of Artificial Sequence: Synthetic oligonucleotide
  misc_feature 1..20: note = Target: ANGPTL3; (-) strand; PAM type: YTN; PAM sequence: TTC
  source 1..20: mol_type = other DNA
atatatatatgtataaaaca

SEQ ID NO: 12145 - DNA, 20 bp, synthetic construct
  misc_feature 1..20: note = Description of Artificial Sequence: Synthetic oligonucleotide
  misc_feature 1..20: note = Target: ANGPTL3; (-) strand; PAM type: YTN; PAM sequence: TTT
  source 1..20: mol_type = other DNA
catatatatatgtataaaac

SEQ ID NO: 12146 - DNA, 20 bp, synthetic construct
  misc_feature 1..20: note = Description of Artificial Sequence: Synthetic oligonucleotide
  misc_feature 1..20: note = Target: ANGPTL3; (-) strand; PAM type: YTN; PAM sequence: CTC
  source 1..20: mol_type = other DNA
atatatatttcatatatata

SEQ ID NO: 12147 - DNA, 20 bp, synthetic construct
  misc_feature 1..20: note = Description of Artificial Sequence: Synthetic oligonucleotide
  misc_feature 1..20: note = Target: ANGPTL3; (-) strand; PAM type: YTN; PAM sequence: TTA
  source 1..20: mol_type = other DNA
tacgaatactcatatatatt

SEQ ID NO: 12148 - DNA, 20 bp, synthetic construct
  misc_feature 1..20: note = Description of Artificial Sequence: Synthetic oligonucleotide
  misc_feature 1..20: note = Target: ANGPTL3; (-) strand; PAM type: YTN; PAM sequence: TTT
  source 1..20: mol_type = other DNA
atacgaatactcatatatat

SEQ ID NO: 12149 - DNA, 20 bp, synthetic construct
  misc_feature 1..20: note = Description of Artificial Sequence: Synthetic oligonucleotide
  misc_feature 1..20: note = Target: ANGPTL3; (-) strand; PAM type: YTN; PAM sequence: TTA
  source 1..20: mol_type = other DNA
tatttatacgaatactcata

SEQ ID NO: 12150 - DNA, 20 bp, synthetic construct
  misc_feature 1..20: note = Description of Artificial Sequence: Synthetic oligonucleotide
  misc_feature 1..20: note = Target: ANGPTL3; (-) strand; PAM type: YTN; PAM sequence: TTG
  source 1..20: mol_type = other DNA
agtaaatacataaacaaggt

SEQ ID NO: 12151 - DNA, 20 bp, synthetic construct
  misc_feature 1..20: note = Description of Artificial Sequence: Synthetic oligonucleotide
  misc_feature 1..20: note = Target: ANGPTL3; (-) strand; PAM type: YTN; PAM sequence: TTA
  source 1..20: mol_type = other DNA
gaggaaaaggagaatattga

SEQ ID NO: 12152 - DNA, 20 bp, synthetic construct
  misc_feature 1..20: note = Description of Artificial Sequence: Synthetic oligonucleotide
  misc_feature 1..20: note = Target: ANGPTL3; (-) strand; PAM type: YTN; PAM sequence: TTT
  source 1..20: mol_type = other DNA
agaggaaaaggagaatattg

SEQ ID NO: 12153 - DNA, 20 bp, synthetic construct
  misc_feature 1..20: note = Description of Artificial Sequence: Synthetic oligonucleotide
  misc_feature 1..20: note = Target: ANGPTL3; (-) strand; PAM type: YTN; PAM sequence: TTT
  source 1..20: mol_type = other DNA
tagaggaaaaggagaatatt

SEQ ID NO: 12154 - DNA, 20 bp, synthetic construct
  misc_feature 1..20: note = Description of Artificial Sequence: Synthetic oligonucleotide
  misc_feature 1..20: note = Target: ANGPTL3; (-) strand; PAM type: YTN; PAM sequence: TTA
  source 1..20: mol_type = other DNA
ttttagaggaaaaggagaat

SEQ ID NO: 12155 - DNA, 20 bp, synthetic construct
  misc_feature 1..20: note = Description of Artificial Sequence: Synthetic oligonucleotide
  misc_feature 1..20: note = Target: ANGPTL3; (-) strand; PAM type: YTN; PAM sequence: TTC
  source 1..20: mol_type = other DNA
agattattttagaggaaaag

SEQ ID NO: 12156 - DNA, 20 bp, synthetic construct
  misc_feature 1..20: note = Description of Artificial Sequence: Synthetic oligonucleotide
  misc_feature 1..20: note = Target: ANGPTL3; (-) strand; PAM type: YTN; PAM sequence: CTT
  source 1..20: mol_type = other DNA
cagattattttagaggaaaa

SEQ ID NO: 12157 - DNA, 20 bp, synthetic construct
  misc_feature 1..20: note = Description of Artificial Sequence: Synthetic oligonucleotide
  misc_feature 1..20: note = Target: ANGPTL3; (-) strand; PAM type: YTN; PAM sequence: TTG
  source 1..20: mol_type = other DNA
ataatagtcacttcagatta

SEQ ID NO: 12158 - DNA, 20 bp, synthetic construct
  misc_feature 1..20: note = Description of Artificial Sequence: Synthetic oligonucleotide
  misc_feature 1..20: note = Target: ANGPTL3; (-) strand; PAM type: YTN; PAM sequence: TTA
  source 1..20: mol_type = other DNA
ttgataatagtcacttcaga

SEQ ID NO: 12159 - DNA, 20 bp, synthetic construct
  misc_feature 1..20: note = Description of Artificial Sequence: Synthetic oligonucleotide
  misc_feature 1..20: note = Target: ANGPTL3; (-) strand; PAM type: YTN; PAM sequence: CTT
  source 1..20: mol_type = other DNA
attgataatagtcacttcag

SEQ ID NO: 12160 - DNA, 20 bp, synthetic construct
  misc_feature 1..20: note = Description of Artificial Sequence: Synthetic oligonucleotide
  misc_feature 1..20: note = Target: ANGPTL3; (-) strand; PAM type: YTN; PAM sequence: TTG
  source 1..20: mol_type = other DNA
gcatagtaaacttattgata

SEQ ID NO: 12161 - DNA, 20 bp, synthetic construct
  misc_feature 1..20: note = Description of Artificial Sequence: Synthetic oligonucleotide
  misc_feature 1..20: note = Target: ANGPTL3; (-) strand; PAM type: YTN; PAM sequence: TTT
  source 1..20: mol_type = other DNA
ggcatagtaaacttattgat

SEQ ID NO: 12162 - DNA, 20 bp, synthetic construct
  misc_feature 1..20: note = Description of Artificial Sequence: Synthetic oligonucleotide
  misc_feature 1..20: note = Target: ANGPTL3; (-) strand; PAM type: YTN; PAM sequence: TTT
  source 1..20: mol_type = other DNA
tggcatagtaaacttattga

SEQ ID NO: 12163 - DNA, 20 bp, synthetic construct
  misc_feature 1..20: note = Description of Artificial Sequence: Synthetic oligonucleotide
  misc_feature 1..20: note = Target: ANGPTL3; (-) strand; PAM type: YTN; PAM sequence: TTA
  source 1..20: mol_type = other DNA
atgaattttggcatagtaaa

SEQ ID NO: 12164 - DNA, 20 bp, synthetic construct
  misc_feature 1..20: note = Description of Artificial Sequence: Synthetic oligonucleotide
  misc_feature 1..20: note = Target: ANGPTL3; (-) strand; PAM type: YTN; PAM sequence: TTA
  source 1..20: mol_type = other DNA
agtgaaaggcaattaatgaa

SEQ ID NO: 12165 - DNA, 20 bp, synthetic construct
  misc_feature 1..20: note = Description of Artificial Sequence: Synthetic oligonucleotide
  misc_feature 1..20: note = Target: ANGPTL3; (-) strand; PAM type: YTN; PAM sequence: TTA
  source 1..20: mol_type = other DNA
tggtcccaaaagttaagtga

SEQ ID NO: 12166 - DNA, 20 bp, synthetic construct
  misc_feature 1..20: note = Description of Artificial Sequence: Synthetic oligonucleotide
  misc_feature 1..20: note = Target: ANGPTL3; (-) strand; PAM type: YTN; PAM sequence: TTA
  source 1..20: mol_type = other DNA
ttatggtcccaaaagttaag

SEQ ID NO: 12167 - DNA, 20 bp, synthetic construct
  misc_feature 1..20: note = Description of Artificial Sequence: Synthetic oligonucleotide
  misc_feature 1..20: note = Target: ANGPTL3; (-) strand; PAM type: YTN; PAM sequence: TTT
  source 1..20: mol_type = other DNA
attatggtcccaaaagttaa

SEQ ID NO: 12168 - DNA, 20 bp, synthetic construct
  misc_feature 1..20: note = Description of Artificial Sequence: Synthetic oligonucleotide
  misc_feature 1..20: note = Target: ANGPTL3; (-) strand; PAM type: YTN; PAM sequence: TTA
  source 1..20: mol_type = other DNA
tttattatggtcccaaaagt

SEQ ID NO: 12169 - DNA, 20 bp, synthetic construct
  misc_feature 1..20: note = Description of Artificial Sequence: Synthetic oligonucleotide
  misc_feature 1..20: note = Target: ANGPTL3; (-) strand; PAM type: YTN; PAM sequence: TTA
  source 1..20: mol_type = other DNA
ttatttattatggtcccaaa

SEQ ID NO: 12170 - DNA, 20 bp, synthetic construct
  misc_feature 1..20: note = Description of Artificial Sequence: Synthetic oligonucleotide
  misc_feature 1..20: note = Target: ANGPTL3; (-) strand; PAM type: YTN; PAM sequence: TTT
  source 1..20: mol_type = other DNA
attatttattatggtcccaa

SEQ ID NO: 12171 - DNA, 20 bp, synthetic construct
  misc_feature 1..20: note = Description of Artificial Sequence: Synthetic oligonucleotide
  misc_feature 1..20: note = Target: ANGPTL3; (-) strand; PAM type: YTN; PAM sequence: TTT
  source 1..20: mol_type = other DNA
tattatttattatggtccca

SEQ ID NO: 12172 - DNA, 20 bp, synthetic construct
  misc_feature 1..20: note = Description of Artificial Sequence: Synthetic oligonucleotide
  misc_feature 1..20: note = Target: ANGPTL3; (-) strand; PAM type: YTN; PAM sequence: TTA
  source 1..20: mol_type = other DNA
tggcaatacattttattatt

SEQ ID NO: 12173 - DNA, 20 bp, synthetic construct
  misc_feature 1..20: note = Description of Artificial Sequence: Synthetic oligonucleotide
  misc_feature 1..20: note = Target: ANGPTL3; (-) strand; PAM type: YTN; PAM sequence: TTA
  source 1..20: mol_type = other DNA
atgttatggcaatacatttt

SEQ ID NO: 12174 - DNA, 20 bp, synthetic construct
  misc_feature 1..20: note = Description of Artificial Sequence: Synthetic oligonucleotide
  misc_feature 1..20: note = Target: ANGPTL3; (-) strand; PAM type: YTN; PAM sequence: TTA
  source 1..20: mol_type = other DNA
ttaatgttatggcaatacat

SEQ ID NO: 12175 - DNA, 20 bp, synthetic construct
  misc_feature 1..20: note = Description of Artificial Sequence: Synthetic oligonucleotide
  misc_feature 1..20: note = Target: ANGPTL3; (-) strand; PAM type: YTN; PAM sequence: TTT
  source 1..20: mol_type = other DNA
attaatgttatggcaataca

SEQ ID NO: 12176 - DNA, 20 bp, synthetic construct
  misc_feature 1..20: note = Description of Artificial Sequence: Synthetic oligonucleotide
  misc_feature 1..20: note = Target: ANGPTL3; (-) strand; PAM type: YTN; PAM sequence: TTG
  source 1..20: mol_type = other DNA
taaggtagtttattaatgtt

SEQ ID NO: 12177 - DNA, 20 bp, synthetic construct
  misc_feature 1..20: note = Description of Artificial Sequence: Synthetic oligonucleotide
  misc_feature 1..20: note = Target: ANGPTL3; (-) strand; PAM type: YTN; PAM sequence: TTT
  source 1..20: mol_type = other DNA
gtaaggtagtttattaatgt

SEQ ID NO: 12178 - DNA, 20 bp, synthetic construct
  misc_feature 1..20: note = Description of Artificial Sequence: Synthetic oligonucleotide
  misc_feature 1..20: note = Target: ANGPTL3; (-) strand; PAM type: YTN; PAM sequence: TTT
  source 1..20: mol_type = other DNA
tgtaaggtagtttattaatg

SEQ ID NO: 12179 - DNA, 20 bp, synthetic construct
  misc_feature 1..20: note = Description of Artificial Sequence: Synthetic oligonucleotide
  misc_feature 1..20: note = Target: ANGPTL3; (-) strand; PAM type: YTN; PAM sequence: TTG
  source 1..20: mol_type = other DNA
gtggttttgtaaggtagttt

SEQ ID NO: 12180 - DNA, 20 bp, synthetic construct
  misc_feature 1..20: note = Description of Artificial Sequence: Synthetic oligonucleotide
  misc_feature 1..20: note = Target: ANGPTL3; (-) strand; PAM type: YTN; PAM sequence: TTA
  source 1..20: mol_type = other DNA
attggtggttttgtaaggta

SEQ ID NO: 12181 - DNA, 20 bp, synthetic construct
  misc_feature 1..20: note = Description of Artificial Sequence: Synthetic oligonucleotide
  misc_feature 1..20: note = Target: ANGPTL3; (-) strand; PAM type: YTN; PAM sequence: TTT
  source 1..20: mol_type = other DNA
aattggtggttttgtaaggt

SEQ ID NO: 12182 - DNA, 20 bp, synthetic construct
  misc_feature 1..20: note = Description of Artificial Sequence: Synthetic oligonucleotide
  misc_feature 1..20: note = Target: ANGPTL3; (-) strand; PAM type: YTN; PAM sequence: TTT
  source 1..20: mol_type = other DNA
taattggtggttttgtaagg

SEQ ID NO: 12183 - DNA, 20 bp, synthetic construct
  misc_feature 1..20: note = Description of Artificial Sequence: Synthetic oligonucleotide
  misc_feature 1..20: note = Target: ANGPTL3; (-) strand; PAM type: YTN; PAM sequence: TTG
  source 1..20: mol_type = other DNA
attttaattggtggttttgt

SEQ ID NO: 12184 - DNA, 20 bp, synthetic construct
  misc_feature 1..20: note = Description of Artificial Sequence: Synthetic oligonucleotide
  misc_feature 1..20: note = Target: ANGPTL3; (-) strand; PAM type: YTN; PAM sequence: TTT
  source 1..20: mol_type = other DNA
gattttaattggtggttttg

SEQ ID NO: 12185 - DNA, 20 bp, synthetic construct
  misc_feature 1..20: note = Description of Artificial Sequence: Synthetic oligonucleotide
  misc_feature 1..20: note = Target: ANGPTL3; (-) strand; PAM type: YTN; PAM sequence: TTG
  source 1..20: mol_type = other DNA
tttgattttaattggtggtt

SEQ ID NO: 12186 - DNA, 20 bp, synthetic construct
  misc_feature 1..20: note = Description of Artificial Sequence: Synthetic oligonucleotide
  misc_feature 1..20: note = Target: ANGPTL3; (-) strand; PAM type: YTN; PAM sequence: TTT
  source 1..20: mol_type = other DNA
gtttgattttaattggtggt

SEQ ID NO: 12187 - DNA, 20 bp, synthetic construct
  misc_feature 1..20: note = Description of Artificial Sequence: Synthetic oligonucleotide
  misc_feature 1..20: note = Target: ANGPTL3; (-) strand; PAM type: YTN; PAM sequence: TTG
  source 1..20: mol_type = other DNA
tttgtttgattttaattggt

SEQ ID NO: 12188 - DNA, 20 bp, synthetic construct
  misc_feature 1..20: note = Description of Artificial Sequence: Synthetic oligonucleotide
  misc_feature 1..20: note = Target: ANGPTL3; (-) strand; PAM type: YTN; PAM sequence: TTT
  source 1..20: mol_type = other DNA
gtttgtttgattttaattgg

SEQ ID NO: 12189 - DNA, 20 bp, synthetic construct
  misc_feature 1..20: note = Description of Artificial Sequence: Synthetic oligonucleotide
  misc_feature 1..20: note = Target: ANGPTL3; (-) strand; PAM type: YTN; PAM sequence: TTT
  source 1..20: mol_type = other DNA
tgtttgtttgattttaattg

SEQ ID NO: 12190 - DNA, 20 bp, synthetic construct
  misc_feature 1..20: note = Description of Artificial Sequence: Synthetic oligonucleotide
  misc_feature 1..20: note = Target: ANGPTL3; (-) strand; PAM type: YTN; PAM sequence: TTT
  source 1..20: mol_type = other DNA
ttgtttgtttgattttaatt

SEQ ID NO: 12191 - DNA, 20 bp, synthetic construct
  misc_feature 1..20: note = Description of Artificial Sequence: Synthetic oligonucleotide
  misc_feature 1..20: note = Target: ANGPTL3; (-) strand; PAM type: YTN; PAM sequence: TTT
  source 1..20: mol_type = other DNA
tttgtttgtttgattttaat

SEQ ID NO: 12192 - DNA, 20 bp, synthetic construct
  misc_feature 1..20: note = Description of Artificial Sequence: Synthetic oligonucleotide
  misc_feature 1..20: note = Target: ANGPTL3; (-) strand; PAM type: YTN; PAM sequence: CTT
  source 1..20: mol_type = other DNA
ttttgtttgtttgattttaa

SEQ ID NO: 12193 - DNA, 20 bp, synthetic construct
  misc_feature 1..20: note = Description of Artificial Sequence: Synthetic oligonucleotide
  misc_feature 1..20: note = Target: ANGPTL3; (-) strand; PAM type: YTN; PAM sequence: TTG
  source 1..20: mol_type = other DNA
acagatgtaaataacacttt

SEQ ID NO: 12194 - DNA, 20 bp, synthetic construct
  misc_feature 1..20: note = Description of Artificial Sequence: Synthetic oligonucleotide
  misc_feature 1..20: note = Target: ANGPTL3; (-) strand; PAM type: YTN; PAM sequence: TTA
  source 1..20: mol_type = other DNA
tgttgacagatgtaaataac

SEQ ID NO: 12195 - DNA, 20 bp, synthetic construct
  misc_feature 1..20: note = Description of Artificial Sequence: Synthetic oligonucleotide
  misc_feature 1..20: note = Target: ANGPTL3; (-) strand; PAM type: YTN; PAM sequence: TTT
  source 1..20: mol_type = other DNA
atgttgacagatgtaaataa

SEQ ID NO: 12196 - DNA, 20 bp, synthetic construct
  misc_feature 1..20: note = Description of Artificial Sequence: Synthetic oligonucleotide
  misc_feature 1..20: note = Target: ANGPTL3; (-) strand; PAM type: YTN; PAM sequence: TTA
  source 1..20: mol_type = other DNA
gtagatttatgttgacagat

SEQ ID NO: 12197 - DNA, 20 bp, synthetic construct
  misc_feature 1..20: note = Description of Artificial Sequence: Synthetic oligonucleotide
  misc_feature 1..20: note = Target: ANGPTL3; (-) strand; PAM type: YTN; PAM sequence: TTT
  source 1..20: mol_type = other DNA
agtagatttatgttgacaga

SEQ ID NO: 12198 - DNA, 20 bp, synthetic construct
  misc_feature 1..20: note = Description of Artificial Sequence: Synthetic oligonucleotide
  misc_feature 1..20: note = Target: ANGPTL3; (-) strand; PAM type: YTN; PAM sequence: TTT
  source 1..20: mol_type = other DNA
tagtagatttatgttgacag

SEQ ID NO: 12199 - DNA, 20 bp, synthetic construct
  misc_feature 1..20: note = Description of Artificial Sequence: Synthetic oligonucleotide
  misc_feature 1..20: note = Target: ANGPTL3; (-) strand; PAM type: YTN; PAM sequence: TTT
  source 1..20: mol_type = other DNA
ttagtagatttatgttgaca

SEQ ID NO: 12200 - DNA, 20 bp, synthetic construct
  misc_feature 1..20: note = Description of Artificial Sequence: Synthetic oligonucleotide
  misc_feature 1..20: note = Target: ANGPTL3; (-) strand; PAM type: YTN; PAM sequence: CTG
  source 1..20: mol_type = other DNA
aatataatgaatgaaatcat

SEQ ID NO: 12201 - DNA, 20 bp, synthetic construct
  misc_feature 1..20: note = Description of Artificial Sequence: Synthetic oligonucleotide
  misc_feature 1..20: note = Target: ANGPTL3; (-) strand; PAM type: YTN; PAM sequence: CTA
  source 1..20: mol_type = other DNA
cctgaatataatgaatgaaa

SEQ ID NO: 12202 - DNA, 20 bp, synthetic construct
  misc_feature 1..20: note = Description of Artificial Sequence: Synthetic oligonucleotide
  misc_feature 1..20: note = Target: ANGPTL3; (-) strand; PAM type: YTN; PAM sequence: TTA
  source 1..20: mol_type = other DNA
atgtccatggactacctgaa

SEQ ID NO: 12203 - DNA, 20 bp, synthetic construct
  misc_feature 1..20: note = Description of Artificial Sequence: Synthetic oligonucleotide
  misc_feature 1..20: note = Target: ANGPTL3; (-) strand; PAM type: YTN; PAM sequence: TTG
  source 1..20: mol_type = other DNA
aattaatgtccatggactac

SEQ ID NO: 12204 - DNA, 20 bp, synthetic construct
  misc_feature 1..20: note = Description of Artificial Sequence: Synthetic oligonucleotide
  misc_feature 1..20: note = Target: ANGPTL3; (-) strand; PAM type: YTN; PAM sequence: TTC
  source 1..20: mol_type = other DNA
gatgttgaattaatgtccat

SEQ ID NO: 12205 - DNA, 20 bp, synthetic construct
  misc_feature 1..20: note = Description of Artificial Sequence: Synthetic oligonucleotide
  misc_feature 1..20: note = Target: ANGPTL3; (-) strand; PAM type: YTN; PAM sequence: CTA
  source 1..20: mol_type = other DNA
ttcgatgttgaattaatgtc

SEQ ID NO: 12206 - DNA, 20 bp, synthetic construct
  misc_feature 1..20: note = Description of Artificial Sequence: Synthetic oligonucleotide
  misc_feature 1..20: note = Target: ANGPTL3; (-) strand; PAM type: YTN; PAM sequence: TTG
  source 1..20: mol_type = other DNA
tgatccatctattcgatgtt

SEQ ID NO: 12207 - DNA, 20 bp, synthetic construct
  misc_feature 1..20: note = Description of Artificial Sequence: Synthetic oligonucleotide
  misc_feature 1..20: note = Target: ANGPTL3; (-) strand; PAM type: YTN; PAM sequence: TTT
  source 1..20: mol_type = other DNA
gtgatccatctattcgatgt

SEQ ID NO: 12208 - DNA, 20 bp, synthetic construct
  misc_feature 1..20: note = Description of Artificial Sequence: Synthetic oligonucleotide
  misc_feature 1..20: note = Target: ANGPTL3; (-) strand; PAM type: YTN; PAM sequence: TTT
  source 1..20: mol_type = other DNA
tgtgatccatctattcgatg

SEQ ID NO: 12209 - DNA, 20 bp, synthetic construct
  misc_feature 1..20: note = Description of Artificial Sequence: Synthetic oligonucleotide
  misc_feature 1..20: note = Target: ANGPTL3; (-) strand; PAM type: YTN; PAM sequence: TTG
  source 1..20: mol_type = other DNA
aagttttgtgatccatctat

SEQ ID NO: 12210 - DNA, 20 bp, synthetic construct
  misc_feature 1..20: note = Description of Artificial Sequence: Synthetic oligonucleotide
  misc_feature 1..20: note = Target: ANGPTL3; (-) strand; PAM type: YTN; PAM sequence: TTC
  source 1..20: mol_type = other DNA
attgaagttttgtgatccat

SEQ ID NO: 12211 - DNA, 20 bp, synthetic construct
  misc_feature 1..20: note = Description of Artificial Sequence: Synthetic oligonucleotide
  misc_feature 1..20: note = Target: ANGPTL3; (-) strand; PAM type: YTN; PAM sequence: TTT
  source 1..20: mol_type = other DNA
cattgaagttttgtgatcca

SEQ ID NO: 12212 - DNA, 20 bp, synthetic construct
  misc_feature 1..20: note = Description of Artificial Sequence: Synthetic oligonucleotide
  misc_feature 1..20: note = Target: ANGPTL3; (-) strand; PAM type: YTN; PAM sequence: CTC
  source 1..20: mol_type = other DNA
ccacgtttcattgaagtttt

SEQ ID NO: 12213 - DNA, 20 bp, synthetic construct
  misc_feature 1..20: note = Description of Artificial Sequence: Synthetic oligonucleotide
  misc_feature 1..20: note = Target: ANGPTL3; (-) strand; PAM type: YTN; PAM sequence: TTC
  source 1..20: mol_type = other DNA
tcccacgtttcattgaagtt

SEQ ID NO: 12214 - DNA, 20 bp, synthetic construct
  misc_feature 1..20: note = Description of Artificial Sequence: Synthetic oligonucleotide
  misc_feature 1..20: note = Target: ANGPTL3; (-) strand; PAM type: YTN; PAM sequence: TTG
  source 1..20: mol_type = other DNA
tagttctcccacgtttcatt

SEQ ID NO: 12215 - DNA, 20 bp, synthetic construct
  misc_feature 1..20: note = Description of Artificial Sequence: Synthetic oligonucleotide
  misc_feature 1..20: note = Target: ANGPTL3; (-) strand; PAM type: YTN; PAM sequence: TTT
  source 1..20: mol_type = other DNA
gtagttctcccacgtttcat

SEQ ID NO: 12216 - DNA, 20 bp, synthetic construct
  misc_feature 1..20: note = Description of Artificial Sequence: Synthetic oligonucleotide
  misc_feature 1..20: note = Target: ANGPTL3; (-) strand; PAM type: YTN; PAM sequence: CTC
  source 1..20: mol_type = other DNA
ccaaaaccatatttgtagtt

SEQ ID NO: 12217 - DNA, 20 bp, synthetic construct
  misc_feature 1..20: note = Description of Artificial Sequence: Synthetic oligonucleotide
  misc_feature 1..20: note = Target: ANGPTL3; (-) strand; PAM type: YTN; PAM sequence: TTA
  source 1..20: mol_type = other DNA
ccatcaagcctcccaaaacc

SEQ ID NO: 12218 - DNA, 20 bp, synthetic construct
  misc_feature 1..20: note = Description of Artificial Sequence: Synthetic oligonucleotide
  misc_feature 1..20: note = Target: ANGPTL3; (-) strand; PAM type: YTN; PAM sequence: CTT
  source 1..20: mol_type = other DNA
accatcaagcctcccaaaac

SEQ ID NO: 12219 - DNA, 20 bp, synthetic construct
  misc_feature 1..20: note = Description of Artificial Sequence: Synthetic oligonucleotide
  misc_feature 1..20: note = Target: ANGPTL3; (-) strand; PAM type: YTN; PAM sequence: TTG
  source 1..20: mol_type = other DNA
aatgtagtccccttaccatc

SEQ ID NO: 12220 - DNA, 20 bp, synthetic construct
  misc_feature 1..20: note = Description of Artificial Sequence: Synthetic oligonucleotide
  misc_feature 1..20: note = Target: ANGPTL3; (-) strand; PAM type: YTN; PAM sequence: TTA
  source 1..20: mol_type = other DNA
gcaagtgaatgaatgattga

SEQ ID NO: 12221 - DNA, 20 bp, synthetic construct
  misc_feature 1..20: note = Description of Artificial Sequence: Synthetic oligonucleotide
  misc_feature 1..20: note = Target: ANGPTL3; (-) strand; PAM type: YTN; PAM sequence: TTG
  source 1..20: mol_type = other DNA
tagattagcaagtgaatgaa

SEQ ID NO: 12222 - DNA, 20 bp, synthetic construct
  misc_feature 1..20: note = Description of Artificial Sequence: Synthetic oligonucleotide
  misc_feature 1..20: note = Target: ANGPTL3; (-) strand; PAM type: YTN; PAM sequence: TTT
  source 1..20: mol_type = other DNA
gtagattagcaagtgaatga

SEQ ID NO: 12223 - DNA, 20 bp, synthetic construct
  misc_feature 1..20: note = Description of Artificial Sequence: Synthetic oligonucleotide
  misc_feature 1..20: note = Target: ANGPTL3; (-) strand; PAM type: YTN; PAM sequence: CTC
  source 1..20: mol_type = other DNA
agtaaatatttgtagattag

SEQ ID NO: 12224 - DNA, 20 bp, synthetic construct
  misc_feature 1..20: note = Description of Artificial Sequence: Synthetic oligonucleotide
  misc_feature 1..20: note = Target: ANGPTL3; (-) strand; PAM type: YTN; PAM sequence: TTC
  source 1..20: mol_type = other DNA
tcagtaaatatttgtagatt

SEQ ID NO: 12225 - DNA, 20 bp, synthetic construct
  misc_feature 1..20: note = Description of Artificial Sequence: Synthetic oligonucleotide
  misc_feature 1..20: note = Target: ANGPTL3; (-) strand; PAM type: YTN; PAM sequence: CTG
  source 1..20: mol_type = other DNA
gtccataagaggttctcagt

SEQ ID NO: 12226 - DNA, 20 bp, synthetic construct
  misc_feature 1..20: note = Description of Artificial Sequence: Synthetic oligonucleotide
  misc_feature 1..20: note = Target: ANGPTL3; (-) strand; PAM type: YTN; PAM sequence: CTA
  source 1..20: mol_type = other DNA
atacctggtccataagaggt

SEQ ID NO: 12227 - DNA, 20 bp, synthetic construct
  misc_feature 1..20: note = Description of Artificial Sequence: Synthetic oligonucleotide
  misc_feature 1..20: note = Target: ANGPTL3; (-) strand; PAM type: YTN; PAM sequence: TTC
  source 1..20: mol_type = other DNA
ctaatacctggtccataaga

SEQ ID NO: 12228 - DNA, 20 bp, synthetic construct
  misc_feature 1..20: note = Description of Artificial Sequence: Synthetic oligonucleotide
  misc_feature 1..20: note = Target: ANGPTL3; (-) strand; PAM type: YTN; PAM sequence: TTT
  source 1..20: mol_type = other DNA
cctaatacctggtccataag

SEQ ID NO: 12229 - DNA, 20 bp, synthetic construct
  misc_feature 1..20: note = Description of Artificial Sequence: Synthetic oligonucleotide
  misc_feature 1..20: note = Target: ANGPTL3; (-) strand; PAM type: YTN; PAM sequence: TTT
  source 1..20: mol_type = other DNA
tcctaatacctggtccataa

SEQ ID NO: 12230 - DNA, 20 bp, synthetic construct
  misc_feature 1..20: note = Description of Artificial Sequence: Synthetic oligonucleotide
  misc_feature 1..20: note = Target: ANGPTL3; (-) strand; PAM type: YTN; PAM sequence: CTT
  source 1..20: mol_type = other DNA
ttcctaatacctggtccata

SEQ ID NO: 12231 - DNA, 20 bp, synthetic construct
  misc_feature 1..20: note = Description of Artificial Sequence: Synthetic oligonucleotide
  misc_feature 1..20: note = Target: ANGPTL3; (-) strand; PAM type: YTN; PAM sequence: CTA
  source 1..20: mol_type = other DNA
cttttcctaatacctggtcc

SEQ ID NO: 12232 - DNA, 20 bp, synthetic construct
  misc_feature 1..20: note = Description of Artificial Sequence: Synthetic oligonucleotide
  misc_feature 1..20: note = Target: ANGPTL3; (-) strand; PAM type: YTN; PAM sequence: TTA
  source 1..20: mol_type = other DNA
ctacttttcctaatacctgg

SEQ ID NO: 12233 - DNA, 20 bp, synthetic construct
  misc_feature 1..20: note = Description of Artificial Sequence: Synthetic oligonucleotide
  misc_feature 1..20: note = Target: ANGPTL3; (-) strand; PAM type: YTN; PAM sequence: TTC
  source 1..20: mol_type = other DNA
gttactacttttcctaatac

SEQ ID NO: 12234 - DNA, 20 bp, synthetic construct
  misc_feature 1..20: note = Description of Artificial Sequence: Synthetic oligonucleotide
  misc_feature 1..20: note = Target: ANGPTL3; (-) strand; PAM type: YTN; PAM sequence: CTC
  source 1..20: mol_type = other DNA
gttcgttactacttttccta

SEQ ID NO: 12235 - DNA, 20 bp, synthetic construct
  misc_feature 1..20: note = Description of Artificial Sequence: Synthetic oligonucleotide
  misc_feature 1..20: note = Target: ANGPTL3; (-) strand; PAM type: YTN; PAM sequence: TTC
  source 1..20: mol_type = other DNA
tcgttcgttactacttttcc

SEQ ID NO: 12236 - DNA, 20 bp, synthetic construct
  misc_feature 1..20: note = Description of Artificial Sequence: Synthetic oligonucleotide
  misc_feature 1..20: note = Target: ANGPTL3; (-) strand; PAM type: YTN; PAM sequence: CTT
  source 1..20: mol_type = other DNA
ctcgttcgttactacttttc

SEQ ID NO: 12237 - DNA, 20 bp, synthetic construct
  misc_feature 1..20: note = Description of Artificial Sequence: Synthetic oligonucleotide
  misc_feature 1..20: note = Target: ANGPTL3; (-) strand; PAM type: YTN; PAM sequence: CTG
  source 1..20: mol_type = other DNA
cttctcgttcgttactactt

SEQ ID NO: 12238 - DNA, 20 bp, synthetic construct
  misc_feature 1..20: note = Description of Artificial Sequence: Synthetic oligonucleotide
  misc_feature 1..20: note = Target: ANGPTL3; (-) strand; PAM type: YTN; PAM sequence: CTG
  source 1..20: mol_type = other DNA
agactgcttctcgttcgtta

SEQ ID NO: 12239 - DNA, 20 bp, synthetic construct
  misc_feature 1..20: note = Description of Artificial Sequence: Synthetic oligonucleotide
  misc_feature 1..20: note = Target: ANGPTL3; (-) strand; PAM type: YTN; PAM sequence: TTA
  source 1..20: mol_type = other DNA
tatgaaggctgagactgctt

SEQ ID NO: 12240 - DNA, 20 bp, synthetic construct
  misc_feature 1..20: note = Description of Artificial Sequence: Synthetic oligonucleotide
  misc_feature 1..20: note = Target: ANGPTL3; (-) strand; PAM type: YTN; PAM sequence: TTG
  source 1..20: mol_type = other DNA
ataataaattatatgaaggc

SEQ ID NO: 12241 - DNA, 20 bp, synthetic construct
  misc_feature 1..20: note = Description of Artificial Sequence: Synthetic oligonucleotide
  misc_feature 1..20: note = Target: ANGPTL3; (-) strand; PAM type: YTN; PAM sequence: TTT
  source 1..20: mol_type = other DNA
gataataaattatatgaagg

SEQ ID NO: 12242 - DNA, 20 bp, synthetic construct
  misc_feature 1..20: note = Description of Artificial Sequence: Synthetic oligonucleotide
  misc_feature 1..20: note = Target: ANGPTL3; (-) strand; PAM type: YTN; PAM sequence: TTG
  source 1..20: mol_type = other DNA
tttgataataaattatatga

SEQ ID NO: 12243 - DNA, 20 bp, synthetic construct
  misc_feature 1..20: note = Description of Artificial Sequence: Synthetic oligonucleotide
  misc_feature 1..20: note = Target: ANGPTL3; (-) strand; PAM type: YTN; PAM sequence: CTA
  source 1..20: mol_type = other DNA
acaaatgtgtaattgtttga

SEQ ID NO: 12244 - DNA, 20 bp, synthetic construct
  misc_feature 1..20: note = Description of Artificial Sequence: Synthetic oligonucleotide
  misc_feature 1..20: note = Target: ANGPTL3; (-) strand; PAM type: YTN; PAM sequence: TTA
  source 1..20: mol_type = other DNA
ctaacaaatgtgtaattgtt

SEQ ID NO: 12245 - DNA, 20 bp, synthetic construct
  misc_feature 1..20: note = Description of Artificial Sequence: Synthetic oligonucleotide
  misc_feature 1..20: note = Target: ANGPTL3; (-) strand; PAM type: YTN; PAM sequence: TTT
  source 1..20: mol_type = other DNA
actaacaaatgtgtaattgt

SEQ ID NO: 12246 - DNA, 20 bp, synthetic construct
  misc_feature 1..20: note = Description of Artificial Sequence: Synthetic oligonucleotide
  misc_feature 1..20: note = Target: ANGPTL3; (-) strand; PAM type: YTN; PAM sequence: TTG
  source 1..20: mol_type = other DNA
taataagtgtaatttactaa

SEQ ID NO: 12247 - DNA, 20 bp, synthetic construct
  misc_feature 1..20: note = Description of Artificial Sequence: Synthetic oligonucleotide
  misc_feature 1..20: note = Target: ANGPTL3; (-) strand; PAM type: YTN; PAM sequence: TTC
  source 1..20: mol_type = other DNA
aaataataacagttgtaata

SEQ ID NO: 12248 - DNA, 20 bp, synthetic construct
  misc_feature 1..20: note = Description of Artificial Sequence: Synthetic oligonucleotide
  misc_feature 1..20: note = Target: ANGPTL3; (-) strand; PAM type: YTN; PAM sequence: TTG
  source 1..20: mol_type = other DNA
tgataaatataattcaaata

SEQ ID NO: 12249 - DNA, 20 bp, synthetic construct
  misc_feature 1..20: note = Description of Artificial Sequence: Synthetic oligonucleotide
  misc_feature 1..20: note = Target: ANGPTL3; (-) strand; PAM type: YTN; PAM sequence: TTA
  source 1..20: mol_type = other DNA
agaacagacatgtaattgtg

SEQ ID NO: 12250 - DNA, 20 bp, synthetic construct
  misc_feature 1..20: note = Description of Artificial Sequence: Synthetic oligonucleotide
  misc_feature 1..20: note = Target: ANGPTL3; (-) strand; PAM type: YTN; PAM sequence: TTT
  source 1..20: mol_type = other DNA
aagaacagacatgtaattgt

SEQ ID NO: 12251 - DNA, 20 bp, synthetic construct
  misc_feature 1..20: note = Description of Artificial Sequence: Synthetic oligonucleotide
  misc_feature 1..20: note = Target: ANGPTL3; (-) strand; PAM type: YTN; PAM sequence: TTG
  source 1..20: mol_type = other DNA
tgataagtatatttaagaac

SEQ ID NO: 12252 - DNA, 20 bp, synthetic construct
  misc_feature 1..20: note = Description of Artificial Sequence: Synthetic oligonucleotide
  misc_feature 1..20: note = Target: ANGPTL3; (-) strand; PAM type: YTN; PAM sequence: TTA
  source 1..20: mol_type = other DNA
aattgtgataagtatattta

SEQ ID NO: 12253 - DNA, 20 bp, synthetic construct
  misc_feature 1..20: note = Description of Artificial Sequence: Synthetic oligonucleotide
  misc_feature 1..20: note = Target: ANGPTL3; (-) strand; PAM type: YTN; PAM sequence: TTG
  source 1..20: mol_type = other DNA
taagccgtggaattaaattg

SEQ ID NO: 12254 - DNA, 20 bp, synthetic construct
  misc_feature 1..20: note = Description of Artificial Sequence: Synthetic oligonucleotide
  misc_feature 1..20: note = Target: ANGPTL3; (-) strand; PAM type: YTN; PAM sequence: TTA
  source 1..20: mol_type = other DNA
tgatcattgtaagccgtgga

SEQ ID NO: 12255 - DNA, 20 bp, synthetic construct
  misc_feature 1..20: note = Description of Artificial Sequence: Synthetic oligonucleotide
  misc_feature 1..20: note = Target: ANGPTL3; (-) strand; PAM type: YTN; PAM sequence: TTA
  source 1..20: mol_type = other DNA
tagttatgatcattgtaagc

SEQ ID NO: 12256 - DNA, 20 bp, synthetic construct
  misc_feature 1..20: note = Description of Artificial Sequence: Synthetic oligonucleotide
  misc_feature 1..20: note = Target: ANGPTL3; (-) strand; PAM type: YTN; PAM sequence: TTA
  source 1..20: mol_type = other DNA
ataattatagttatgatcat

SEQ ID NO: 12257 - DNA, 20 bp, synthetic construct
  misc_feature 1..20: note = Description of Artificial Sequence: Synthetic oligonucleotide
  misc_feature 1..20: note = Target: ANGPTL3; (-) strand; PAM type: YTN; PAM sequence: TTT
  source 1..20: mol_type = other DNA
aataattatagttatgatca

SEQ ID NO: 12258 - DNA, 20 bp, synthetic construct
  misc_feature 1..20: note = Description of Artificial Sequence: Synthetic oligonucleotide
  misc_feature 1..20: note = Target: ANGPTL3; (-) strand; PAM type: YTN; PAM sequence: CTT
  source 1..20: mol_type = other DNA
taataattatagttatgatc

SEQ ID NO: 12259 - DNA, 20 bp, synthetic construct
  misc_feature 1..20: note = Description of Artificial Sequence: Synthetic oligonucleotide
  misc_feature 1..20: note = Target: ANGPTL3; (-) strand; PAM type: YTN; PAM sequence: TTG
  source 1..20: mol_type = other DNA
tctttaataattatagttat

SEQ ID NO: 12260 - DNA, 20 bp, synthetic construct
  misc_feature 1..20: note = Description of Artificial Sequence: Synthetic oligonucleotide
  misc_feature 1..20: note = Target: ANGPTL3; (-) strand; PAM type: YTN; PAM sequence: TTA
  source 1..20: mol_type = other DNA
atcaaaattgtctttaataa

SEQ ID NO: 12261 - DNA, 20 bp, synthetic construct
  misc_feature 1..20: note = Description of Artificial Sequence: Synthetic oligonucleotide
  misc_feature 1..20: note = Target: ANGPTL3; (-) strand; PAM type: YTN; PAM sequence: TTT
  source 1..20: mol_type = other DNA
aatcaaaattgtctttaata

SEQ ID NO: 12262 - DNA, 20 bp, synthetic construct
  misc_feature 1..20: note = Description of Artificial Sequence: Synthetic oligonucleotide
  misc_feature 1..20: note = Target: ANGPTL3; (-) strand; PAM type: YTN; PAM sequence: TTA
  source 1..20: mol_type = other DNA
tgacataacatttaatcaaa

SEQ ID NO: 12263 - DNA, 20 bp, synthetic construct
  misc_feature 1..20: note = Description of Artificial Sequence: Synthetic oligonucleotide
  misc_feature 1..20: note = Target: ANGPTL3; (-) strand; PAM type: YTN; PAM sequence: CTT
  source 1..20: mol_type = other DNA
atgacataacatttaatcaa

SEQ ID NO: 12264 - DNA, 20 bp, synthetic construct
  misc_feature 1..20: note = Description of Artificial Sequence: Synthetic oligonucleotide
  misc_feature 1..20: note = Target: ANGPTL3; (-) strand; PAM type: YTN; PAM sequence: CTA
  source 1..20: mol_type = other DNA
cttatgacataacatttaat

SEQ ID NO: 12265 - DNA, 20 bp, synthetic construct
  misc_feature 1..20: note = Description of Artificial Sequence: Synthetic oligonucleotide
  misc_feature 1..20: note = Target: ANGPTL3; (-) strand; PAM type: YTN; PAM sequence: TTA
  source 1..20: mol_type = other DNA
ctacttatgacataacattt

SEQ ID NO: 12266 - DNA, 20 bp, synthetic construct
  misc_feature 1..20: note = Description of Artificial Sequence: Synthetic oligonucleotide
  misc_feature 1..20: note = Target: ANGPTL3; (-) strand; PAM type: YTN; PAM sequence: TTG
  source 1..20: mol_type = other DNA
taacagttactacttatgac

SEQ ID NO: 12267 - DNA, 20 bp, synthetic construct
  misc_feature 1..20: note = Description of Artificial Sequence: Synthetic oligonucleotide
  misc_feature 1..20: note = Target: ANGPTL3; (-) strand; PAM type: YTN; PAM sequence: TTT
  source 1..20: mol_type = other DNA
gtaacagttactacttatga

SEQ ID NO: 12268 - DNA, 20 bp, synthetic construct
  misc_feature 1..20: note = Description of Artificial Sequence: Synthetic oligonucleotide
  misc_feature 1..20: note = Target: ANGPTL3; (-) strand; PAM type: YTN; PAM sequence: TTA
  source 1..20: mol_type = other DNA
tttgtaacagttactactta

SEQ ID NO: 12269 - DNA, 20 bp, synthetic construct
  misc_feature 1..20: note = Description of Artificial Sequence: Synthetic oligonucleotide
  misc_feature 1..20: note = Target: ANGPTL3; (-) strand; PAM type: YTN; PAM sequence: CTT
  source 1..20: mol_type = other DNA
atttgtaacagttactactt

SEQ ID NO: 12270 - DNA, 20 bp, synthetic construct
  misc_feature 1..20: note = Description of Artificial Sequence: Synthetic oligonucleotide
  misc_feature 1..20: note = Target: ANGPTL3; (-) strand; PAM type: YTN; PAM sequence: TTC
  source 1..20: mol_type = other DNA
acagcttatttgtaacagtt

SEQ ID NO: 12271 - DNA, 20 bp, synthetic construct
  misc_feature 1..20: note = Description of Artificial Sequence: Synthetic oligonucleotide
  misc_feature 1..20: note = Target: ANGPTL3; (-) strand; PAM type: YTN; PAM sequence: TTT
  source 1..20: mol_type = other DNA
cacagcttatttgtaacagt

SEQ ID NO: 12272 - DNA, 20 bp, synthetic construct
  misc_feature 1..20: note = Description of Artificial Sequence: Synthetic oligonucleotide
  misc_feature 1..20: note = Target: ANGPTL3; (-) strand; PAM type: YTN; PAM sequence: TTT
  source 1..20: mol_type = other DNA
tcacagcttatttgtaacag

SEQ ID NO: 12273 - DNA, 20 bp, synthetic construct
  misc_feature 1..20: note = Description of Artificial Sequence: Synthetic oligonucleotide
  misc_feature 1..20: note = Target: ANGPTL3; (-) strand; PAM type: YTN; PAM sequence: CTT
  source 1..20: mol_type = other DNA
ttcacagcttatttgtaaca

SEQ ID NO: 12274 - DNA, 20 bp, synthetic construct
  misc_feature 1..20: note = Description of Artificial Sequence: Synthetic oligonucleotide
  misc_feature 1..20: note = Target: ANGPTL3; (-) strand; PAM type: YTN; PAM sequence: TTC
  source 1..20: mol_type = other DNA
ttttcacagcttatttgtaa

SEQ ID NO: 12275 - DNA, 20 bp, synthetic construct
  misc_feature 1..20: note = Description of Artificial Sequence: Synthetic oligonucleotide
  misc_feature 1..20: note = Target: ANGPTL3; (-) strand; PAM type: YTN; PAM sequence: CTA
  source 1..20: mol_type = other DNA
ggagtggttcttttcacagc

SEQ ID NO: 12276 - DNA, 20 bp, synthetic construct
  misc_feature 1..20: note = Description of Artificial Sequence: Synthetic oligonucleotide
  misc_feature 1..20: note = Target: ANGPTL3; (-) strand; PAM type: YTN; PAM sequence: CTA
  source 1..20: mol_type = other DNA
atgctaggagtggttctttt

SEQ ID NO: 12277 - DNA, 20 bp, synthetic construct
  misc_feature 1..20: note = Description of Artificial Sequence: Synthetic oligonucleotide
  misc_feature 1..20: note = Target: ANGPTL3; (-) strand; PAM type: YTN; PAM sequence: TTA
  source 1..20: mol_type = other DNA
atgagagaatagagtgacta

SEQ ID NO: 12278 - DNA, 20 bp, synthetic construct
  misc_feature 1..20: note = Description of Artificial Sequence: Synthetic oligonucleotide
  misc_feature 1..20: note = Target: ANGPTL3; (-) strand; PAM type: YTN; PAM sequence: TTG
  source 1..20: mol_type = other DNA
atatgtaaaacgttaatgag

SEQ ID NO: 12279 - DNA, 20 bp, synthetic construct
  misc_feature 1..20: note = Description of Artificial Sequence: Synthetic oligonucleotide
  misc_feature 1..20: note = Target: ANGPTL3; (-) strand; PAM type: YTN; PAM sequence: TTA
  source 1..20: mol_type = other DNA
attgatatgtaaaacgttaa

SEQ ID NO: 12280 - DNA, 20 bp, synthetic construct
  misc_feature 1..20: note = Description of Artificial Sequence: Synthetic oligonucleotide
  misc_feature 1..20: note = Target: ANGPTL3; (-) strand; PAM type: YTN; PAM sequence: TTC
  source 1..20: mol_type = other DNA
caattaattgatatgtaaaa

SEQ ID NO: 12281 - DNA, 20 bp, synthetic construct
  misc_feature 1..20: note = Description of Artificial Sequence: Synthetic oligonucleotide
  misc_feature 1..20: note = Target: ANGPTL3; (-) strand; PAM type: YTN; PAM sequence: CTT
  source 1..20: mol_type = other DNA
ccaattaattgatatgtaaa

SEQ ID NO: 12282 - DNA, 20 bp, synthetic construct
  misc_feature 1..20: note = Description of Artificial Sequence: Synthetic oligonucleotide
  misc_feature 1..20: note = Target: ANGPTL3; (-) strand; PAM type: YTN; PAM sequence: TTA
  source 1..20: mol_type = other DNA
acttccaattaattgatatg

SEQ ID NO: 12283 - DNA, 20 bp, synthetic construct
  misc_feature 1..20: note = Description of Artificial Sequence: Synthetic oligonucleotide
  misc_feature 1..20: note = Target: ANGPTL3; (-) strand; PAM type: YTN; PAM sequence: TTT
  source 1..20: mol_type = other DNA
aacttccaattaattgatat

SEQ ID NO: 12284 - DNA, 20 bp, synthetic construct
  misc_feature 1..20: note = Description of Artificial Sequence: Synthetic oligonucleotide
  misc_feature 1..20: note = Target: ANGPTL3; (-) strand; PAM type: YTN; PAM sequence: TTT
  source 1..20: mol_type = other DNA
taacttccaattaattgata

SEQ ID NO: 12285 - DNA, 20 bp, synthetic construct
  misc_feature 1..20: note = Description of Artificial Sequence: Synthetic oligonucleotide
  misc_feature 1..20: note = Target: ANGPTL3; (-) strand; PAM type: YTN; PAM sequence: CTT
  source 1..20: mol_type = other DNA
ttaacttccaattaattgat

SEQ ID NO: 12286 - DNA, 20 bp, synthetic construct
  misc_feature 1..20: note = Description of Artificial Sequence: Synthetic oligonucleotide
  misc_feature 1..20: note = Target: ANGPTL3; (-) strand; PAM type: YTN; PAM sequence: CTG
  source 1..20: mol_type = other DNA
gtccttttaacttccaatta

SEQ ID NO: 12287 - DNA, 20 bp, synthetic construct
  misc_feature 1..20: note = Description of Artificial Sequence: Synthetic oligonucleotide
  misc_feature 1..20: note = Target: ANGPTL3; (-) strand; PAM type: YTN; PAM sequence: TTC
  source 1..20: mol_type = other DNA
ctggtccttttaacttccaa

SEQ ID NO: 12288 - DNA, 20 bp, synthetic construct
  misc_feature 1..20: note = Description of Artificial Sequence: Synthetic oligonucleotide
  misc_feature 1..20: note = Target: ANGPTL3; (-) strand; PAM type: YTN; PAM sequence: TTT
  source 1..20: mol_type = other DNA
cctggtccttttaacttcca

SEQ ID NO: 12289 - DNA, 20 bp, synthetic construct
  misc_feature 1..20: note = Description of Artificial Sequence: Synthetic oligonucleotide
  misc_feature 1..20: note = Target: ANGPTL3; (-) strand; PAM type: YTN; PAM sequence: CTG
  source 1..20: mol_type = other DNA
agtttcctggtccttttaac

SEQ ID NO: 12290 - DNA, 20 bp, synthetic construct
  misc_feature 1..20: note = Description of Artificial Sequence: Synthetic oligonucleotide
  misc_feature 1..20: note = Target: ANGPTL3; (-) strand; PAM type: YTN; PAM sequence: CTG
  source 1..20: mol_type = other DNA
tatgtctgagtttcctggtc

SEQ ID NO: 12291 - DNA, 20 bp, synthetic construct
  misc_feature 1..20: note = Description of Artificial Sequence: Synthetic oligonucleotide
  misc_feature 1..20: note = Target: ANGPTL3; (-) strand; PAM type: YTN; PAM sequence: TTA
  source 1..20: mol_type = other DNA
aaatgtatactgtatgtctg

SEQ ID NO: 12292 - DNA, 20 bp, synthetic construct
  misc_feature 1..20: note = Description of Artificial Sequence: Synthetic oligonucleotide
  misc_feature 1..20: note = Target: ANGPTL3; (-) strand; PAM type: YTN; PAM sequence: TTT
  source 1..20: mol_type = other DNA
aaaatgtatactgtatgtct

SEQ ID NO: 12293 - DNA, 20 bp, synthetic construct
  misc_feature 1..20: note = Description of Artificial Sequence: Synthetic oligonucleotide
  misc_feature 1..20: note = Target: ANGPTL3; (-) strand; PAM type: YTN; PAM sequence: TTT
  source 1..20: mol_type = other DNA
taaaatgtatactgtatgtc

SEQ ID NO: 12294 - DNA, 20 bp, synthetic construct
  misc_feature 1..20: note = Description of Artificial Sequence: Synthetic oligonucleotide
  misc_feature 1..20: note = Target: ANGPTL3; (-) strand; PAM type: YTN; PAM sequence: TTG
  source 1..20: mol_type = other DNA
aaattttaaaatgtatactg

SEQ ID NO: 12295 - DNA, 20 bp, synthetic construct
  misc_feature 1..20: note = Description of Artificial Sequence: Synthetic oligonucleotide
  misc_feature 1..20: note = Target: ANGPTL3; (-) strand; PAM type: YTN; PAM sequence: TTA
  source 1..20: mol_type = other DNA
aataattgaaattttaaaat

SEQ ID NO: 12296 - DNA, 20 bp, synthetic construct
  misc_feature 1..20: note = Description of Artificial Sequence: Synthetic oligonucleotide
  misc_feature 1..20: note = Target: ANGPTL3; (-) strand; PAM type: YTN; PAM sequence: TTT
  source 1..20: mol_type = other DNA
aaataattgaaattttaaaa

SEQ ID NO: 12297 - DNA, 20 bp, synthetic construct
  misc_feature 1..20: note = Description of Artificial Sequence: Synthetic oligonucleotide
  misc_feature 1..20: note = Target: ANGPTL3; (-) strand; PAM type: YTN; PAM sequence: TTA
  source 1..20: mol_type = other DNA
tatttaaataattgaaattt

SEQ ID NO: 12298 - DNA, 20 bp, synthetic construct
  misc_feature 1..20: note = Description of Artificial Sequence: Synthetic oligonucleotide
  misc_feature 1..20: note = Target: ANGPTL3; (-) strand; PAM type: YTN; PAM sequence: CTA
  source 1..20: mol_type = other DNA
tatattatatttaaataatt

SEQ ID NO: 12299 - DNA, 20 bp, synthetic construct
  misc_feature 1..20: note = Description of Artificial Sequence: Synthetic oligonucleotide
  misc_feature 1..20: note = Target: ANGPTL3; (-) strand; PAM type: YTN; PAM sequence: TTC
  source 1..20: mol_type = other DNA
tatatattatatttaaataa

SEQ ID NO: 12300 - DNA, 20 bp, synthetic construct
  misc_feature 1..20: note = Description of Artificial Sequence: Synthetic oligonucleotide
  misc_feature 1..20: note = Target: ANGPTL3; (-) strand; PAM type: YTN; PAM sequence: TTA
  source 1..20: mol_type = other DNA
taagccatacattctatata

SEQ ID NO: 12301 - DNA, 20 bp, synthetic construct
  misc_feature 1..20: note = Description of Artificial Sequence: Synthetic oligonucleotide
  misc_feature 1..20: note = Target: ANGPTL3; (-) strand; PAM type: YTN; PAM sequence: TTC
  source 1..20: mol_type = other DNA
attataagccatacattcta

SEQ ID NO: 12302 - DNA, 20 bp, synthetic construct
  misc_feature 1..20: note = Description of Artificial Sequence: Synthetic oligonucleotide
  misc_feature 1..20: note = Target: ANGPTL3; (-) strand; PAM type: YTN; PAM sequence: CTA
  source 1..20: mol_type = other DNA
attcattataagccatacat

SEQ ID NO: 12303 - DNA, 20 bp, synthetic construct
  misc_feature 1..20: note = Description of Artificial Sequence: Synthetic oligonucleotide
  misc_feature 1..20: note = Target: ANGPTL3; (-) strand; PAM type: YTN; PAM sequence: TTA
  source 1..20: mol_type = other DNA
actaattcattataagccat

SEQ ID NO: 12304 - DNA, 20 bp, synthetic construct
  misc_feature 1..20: note = Description of Artificial Sequence: Synthetic oligonucleotide
  misc_feature 1..20: note = Target: ANGPTL3; (-) strand; PAM type: YTN; PAM sequence: TTG
  source 1..20: mol_type = other DNA
agttaactaattcattataa

SEQ ID NO: 12305 - DNA, 20 bp, synthetic construct
  misc_feature 1..20: note = Description of Artificial Sequence: Synthetic oligonucleotide
  misc_feature 1..20: note = Target: ANGPTL3; (-) strand; PAM type: YTN; PAM sequence: TTG
  source 1..20: mol_type = other DNA
cattgagttaactaattcat

SEQ ID NO: 12306 - DNA, 20 bp, synthetic construct
  misc_feature 1..20: note = Description of Artificial Sequence: Synthetic oligonucleotide
  misc_feature 1..20: note = Target: ANGPTL3; (-) strand; PAM type: YTN; PAM sequence: TTT
  source 1..20: mol_type = other DNA
gcattgagttaactaattca

SEQ ID NO: 12307 - DNA, 20 bp, synthetic construct
  misc_feature 1..20: note = Description of Artificial Sequence: Synthetic oligonucleotide
  misc_feature 1..20: note = Target: ANGPTL3; (-) strand; PAM type: YTN; PAM sequence: TTG
  source 1..20: mol_type = other DNA
taatcaaaatagaataattt

SEQ ID NO: 12308 - DNA, 20 bp, synthetic construct
  misc_feature 1..20: note = Description of Artificial Sequence: Synthetic oligonucleotide
  misc_feature 1..20: note = Target: ANGPTL3; (-) strand; PAM type: YTN; PAM sequence: TTT
  source 1..20: mol_type = other DNA
gtaatcaaaatagaataatt

SEQ ID NO: 12309 - DNA, 20 bp, synthetic construct
  misc_feature 1..20: note = Description of Artificial Sequence: Synthetic oligonucleotide
  misc_feature 1..20: note = Target: ANGPTL3; (-) strand; PAM type: YTN; PAM sequence: CTA
  source 1..20: mol_type = other DNA
tttgtaatcaaaatagaata

SEQ ID NO: 12310 - DNA, 20 bp, synthetic construct
  misc_feature 1..20: note = Description of Artificial Sequence: Synthetic oligonucleotide
  misc_feature 1..20: note = Target: ANGPTL3; (-) strand; PAM type: YTN; PAM sequence: TTA
  source 1..20: mol_type = other DNA
ctatttgtaatcaaaataga

SEQ ID NO: 12311 - DNA, 20 bp, synthetic construct
  misc_feature 1..20: note = Description of Artificial Sequence: Synthetic oligonucleotide
  misc_feature 1..20: note = Target: ANGPTL3; (-) strand; PAM type: YTN; PAM sequence: TTT
  source 1..20: mol_type = other DNA
actatttgtaatcaaaatag

SEQ ID NO: 12312 - DNA, 20 bp, synthetic construct
  misc_feature 1..20: note = Description of Artificial Sequence: Synthetic oligonucleotide
  misc_feature 1..20: note = Target: ANGPTL3; (-) strand; PAM type: YTN; PAM sequence: TTT
  source 1..20: mol_type = other DNA
tactatttgtaatcaaaata

SEQ ID NO: 12313 - DNA, 20 bp, synthetic construct
  misc_feature 1..20: note = Description of Artificial Sequence: Synthetic oligonucleotide
  misc_feature 1..20: note = Target: ANGPTL3; (-) strand; PAM type: YTN; PAM sequence: TTA
  source 1..20: mol_type = other DNA
ttttactatttgtaatcaaa

SEQ ID NO: 12314 - DNA, 20 bp, synthetic construct
  misc_feature 1..20: note = Description of Artificial Sequence: Synthetic oligonucleotide
  misc_feature 1..20: note = Target: ANGPTL3; (-) strand; PAM type: YTN; PAM sequence: CTT
  source 1..20: mol_type = other DNA
attttactatttgtaatcaa

SEQ ID NO: 12315 - DNA, 20 bp, synthetic construct
  misc_feature 1..20: note = Description of Artificial Sequence: Synthetic oligonucleotide
  misc_feature 1..20: note = Target: ANGPTL3; (-) strand; PAM type: YTN; PAM sequence: TTG
  source 1..20: mol_type = other DNA
cttattttactatttgtaat

SEQ ID NO: 12316 - DNA, 20 bp, synthetic construct
  misc_feature 1..20: note = Description of Artificial Sequence: Synthetic oligonucleotide
  misc_feature 1..20: note = Target: ANGPTL3; (-) strand; PAM type: YTN; PAM sequence: CTT
  source 1..20: mol_type = other DNA
gcttattttactatttgtaa

SEQ ID NO: 12317 - DNA, 20 bp, synthetic construct
  misc_feature 1..20: note = Description of Artificial Sequence: Synthetic oligonucleotide
  misc_feature 1..20: note = Target: ANGPTL3; (-) strand; PAM type: YTN; PAM sequence: TTA
  source 1..20: mol_type = other DNA
tcttgcttattttactattt

SEQ ID NO: 12318 - DNA, 20 bp, synthetic construct
  misc_feature 1..20: note = Description of Artificial Sequence: Synthetic oligonucleotide
  misc_feature 1..20: note = Target: ANGPTL3; (-) strand; PAM type: YTN; PAM sequence: TTT
  source 1..20: mol_type = other DNA
atcttgcttattttactatt

SEQ ID NO: 12319 - DNA, 20 bp, synthetic construct
  misc_feature 1..20: note = Description of Artificial Sequence: Synthetic oligonucleotide
  misc_feature 1..20: note = Target: ANGPTL3; (-) strand; PAM type: YTN; PAM sequence: TTT
  source 1..20: mol_type = other DNA
tatcttgcttattttactat

SEQ ID NO: 12320 - DNA, 20 bp, synthetic construct
  misc_feature 1..20: note = Description of Artificial Sequence: Synthetic oligonucleotide
  misc_feature 1..20: note = Target: ANGPTL3; (-) strand; PAM type: YTN; PAM sequence: TTA
  source 1..20: mol_type = other DNA
ttttatcttgcttattttac

SEQ ID NO: 12321 - DNA, 20 bp, synthetic construct
  misc_feature 1..20: note = Description of Artificial Sequence: Synthetic oligonucleotide
  misc_feature 1..20: note = Target: ANGPTL3; (-) strand; PAM type: YTN; PAM sequence: CTG
  source 1..20: mol_type = other DNA
ttattttatcttgcttattt

SEQ ID NO: 12322 - DNA, 20 bp, synthetic construct
  misc_feature 1..20: note = Description of Artificial Sequence: Synthetic oligonucleotide
  misc_feature 1..20: note = Target: ANGPTL3; (-) strand; PAM type: YTN; PAM sequence: TTA
  source 1..20: mol_type = other DNA
aacatctgttattttatctt

SEQ ID NO: 12323 - DNA, 20 bp, synthetic construct
  misc_feature 1..20: note = Description of Artificial Sequence: Synthetic oligonucleotide
  misc_feature 1..20: note = Target: ANGPTL3; (-) strand; PAM type: YTN; PAM sequence: TTT
  source 1..20: mol_type = other DNA
aaacatctgttattttatct

SEQ ID NO: 12324 - DNA, 20 bp, synthetic construct
  misc_feature 1..20: note = Description of Artificial Sequence: Synthetic oligonucleotide
  misc_feature 1..20: note = Target: ANGPTL3; (-) strand; PAM type: YTN; PAM sequence: TTT
  source 1..20: mol_type = other DNA
taaacatctgttattttatc

SEQ ID NO: 12325 - DNA, 20 bp, synthetic construct
  misc_feature 1..20: note = Description of Artificial Sequence: Synthetic oligonucleotide
  misc_feature 1..20: note = Target: ANGPTL3; (-) strand; PAM type: YTN; PAM sequence: TTG
  source 1..20: mol_type = other DNA
gattttaaacatctgttatt

SEQ ID NO: 12326 - DNA, 20 bp, synthetic construct
  misc_feature 1..20: note = Description of Artificial Sequence: Synthetic oligonucleotide
  misc_feature 1..20: note = Target: ANGPTL3; (-) strand; PAM type: YTN; PAM sequence: TTT
  source 1..20: mol_type = other DNA
ggattttaaacatctgttat

SEQ ID NO: 12327 - DNA, 20 bp, synthetic construct
  misc_feature 1..20: note = Description of Artificial Sequence: Synthetic oligonucleotide
  misc_feature 1..20: note = Target: ANGPTL3; (-) strand; PAM type: YTN; PAM sequence: TTT
  source 1..20: mol_type = other DNA
tggattttaaacatctgtta

SEQ ID NO: 12328 - DNA, 20 bp, synthetic construct
  misc_feature 1..20: note = Description of Artificial Sequence: Synthetic oligonucleotide
  misc_feature 1..20: note = Target: ANGPTL3; (-) strand; PAM type: YTN; PAM sequence: TTT
  source 1..20: mol_type = other DNA
ttggattttaaacatctgtt

SEQ ID NO: 12329 - DNA, 20 bp, synthetic construct
  misc_feature 1..20: note = Description of Artificial Sequence: Synthetic oligonucleotide
  misc_feature 1..20: note = Target: ANGPTL3; (-) strand; PAM type: YTN; PAM sequence: CTT
  source 1..20: mol_type = other DNA
tttggattttaaacatctgt

SEQ ID NO: 12330 - DNA, 20 bp, synthetic construct
  misc_feature 1..20: note = Description of Artificial Sequence: Synthetic oligonucleotide
  misc_feature 1..20: note = Target: ANGPTL3; (-) strand; PAM type: YTN; PAM sequence: TTG
  source 1..20: mol_type = other DNA
tatgtgctttttggatttta

SEQ ID NO: 12331 - DNA, 20 bp, synthetic construct
  misc_feature 1..20: note = Description of Artificial Sequence: Synthetic oligonucleotide
  misc_feature 1..20: note = Target: ANGPTL3; (-) strand; PAM type: YTN; PAM sequence: TTT
  source 1..20: mol_type = other DNA
gtatgtgctttttggatttt

SEQ ID NO: 12332 - DNA, 20 bp, synthetic construct
  misc_feature 1..20: note = Description of Artificial Sequence: Synthetic oligonucleotide
  misc_feature 1..20: note = Target: ANGPTL3; (-) strand; PAM type: YTN; PAM sequence: TTT
  source 1..20: mol_type = other DNA
tgtatgtgctttttggattt

SEQ ID NO: 12333 - DNA, 20 bp, synthetic construct
  misc_feature 1..20: note = Description of Artificial Sequence: Synthetic oligonucleotide
  misc_feature 1..20: note = Target: ANGPTL3; (-) strand; PAM type: YTN; PAM sequence: TTT
  source 1..20: mol_type = other DNA
ttgtatgtgctttttggatt

SEQ ID NO: 12334 - DNA, 20 bp, synthetic construct
  misc_feature 1..20: note = Description of Artificial Sequence: Synthetic oligonucleotide
  misc_feature 1..20: note = Target: ANGPTL3; (-) strand; PAM type: YTN; PAM sequence: TTC
  source 1..20: mol_type = other DNA
atggatttttgtatgtgctt

SEQ ID NO: 12335 - DNA, 20 bp, synthetic construct
  misc_feature 1..20: note = Description of Artificial Sequence: Synthetic oligonucleotide
  misc_feature 1..20: note = Target: ANGPTL3; (-) strand; PAM type: YTN; PAM sequence: TTA
  source 1..20: mol_type = other DNA
gacatcattcatggattttt

SEQ ID NO: 12336 - DNA, 20 bp, synthetic construct
  misc_feature 1..20: note = Description of Artificial Sequence: Synthetic oligonucleotide
  misc_feature 1..20: note = Target: ANGPTL3; (-) strand; PAM type: YTN; PAM sequence: CTT
  source 1..20: mol_type = other DNA
agacatcattcatggatttt

SEQ ID NO: 12337 - DNA, 20 bp, synthetic construct
  misc_feature 1..20: note = Description of Artificial Sequence: Synthetic oligonucleotide
  misc_feature 1..20: note = Target: ANGPTL3; (-) strand; PAM type: YTN; PAM sequence: TTA
  source 1..20: mol_type = other DNA
taagtgagtacttagacatc

SEQ ID NO: 12338 - DNA, 20 bp, synthetic construct
  misc_feature 1..20: note = Description of Artificial Sequence: Synthetic oligonucleotide
  misc_feature 1..20: note = Target: ANGPTL3; (-) strand; PAM type: YTN; PAM sequence: TTT
  source 1..20: mol_type = other DNA
ataagtgagtacttagacat

SEQ ID NO: 12339 - DNA, 20 bp, synthetic construct
  misc_feature 1..20: note = Description of Artificial Sequence: Synthetic oligonucleotide
  misc_feature 1..20: note = Target: ANGPTL3; (-) strand; PAM type: YTN; PAM sequence: CTT
  source 1..20: mol_type = other DNA
tataagtgagtacttagaca

SEQ ID NO: 12340 - DNA, 20 bp, synthetic construct
  misc_feature 1..20: note = Description of Artificial Sequence: Synthetic oligonucleotide
  misc_feature 1..20: note = Target: ANGPTL3; (-) strand; PAM type: YTN; PAM sequence: CTA
  source 1..20: mol_type = other DNA
ctttataagtgagtacttag

SEQ ID NO: 12341 - DNA, 20 bp, synthetic construct
  misc_feature 1..20: note = Description of Artificial Sequence: Synthetic oligonucleotide
  misc_feature 1..20: note = Target: ANGPTL3; (-) strand; PAM type: YTN; PAM sequence: TTC
  source 1..20: mol_type = other DNA
tactttataagtgagtactt

SEQ ID NO: 12342 - DNA, 20 bp, synthetic construct
  misc_feature 1..20: note = Description of Artificial Sequence: Synthetic oligonucleotide
  misc_feature 1..20: note = Target: ANGPTL3; (-) strand; PAM type: YTN; PAM sequence: CTT
  source 1..20: mol_type = other DNA
ctactttataagtgagtact

SEQ ID NO: 12343 - DNA, 20 bp, synthetic construct
  misc_feature 1..20: note = Description of Artificial Sequence: Synthetic oligonucleotide
  misc_feature 1..20: note = Target: ANGPTL3; (-) strand; PAM type: YTN; PAM sequence: TTG
  source 1..20: mol_type = other DNA
atataataatgaatgtcttc

SEQ ID NO: 12344 - DNA, 20 bp, synthetic construct
  misc_feature 1..20: note = Description of Artificial Sequence: Synthetic oligonucleotide
  misc_feature 1..20: note = Target: ANGPTL3; (-) strand; PAM type: YTN; PAM sequence: TTT
  source 1..20: mol_type = other DNA
gatataataatgaatgtctt

SEQ ID NO: 12345 - DNA, 20 bp, synthetic construct
  misc_feature 1..20: note = Description of Artificial Sequence: Synthetic oligonucleotide
  misc_feature 1..20: note = Target: ANGPTL3; (-) strand; PAM type: YTN; PAM sequence: TTA
  source 1..20: mol_type = other DNA
aaaatttgatataataatga

SEQ ID NO: 12346 - DNA, 20 bp, synthetic construct
  misc_feature 1..20: note = Description of Artificial Sequence: Synthetic oligonucleotide
  misc_feature 1..20: note = Target: ANGPTL3; (-) strand; PAM type: YTN; PAM sequence: TTT
  source 1..20: mol_type = other DNA
aaaaatttgatataataatg

SEQ ID NO: 12347 - DNA, 20 bp, synthetic construct
  misc_feature 1..20: note = Description of Artificial Sequence: Synthetic oligonucleotide
  misc_feature 1..20: note = Target: ANGPTL3; (-) strand; PAM type: YTN; PAM sequence: CTG
  source 1..20: mol_type = other DNA
agcatttaaaaatttgatat

SEQ ID NO: 12348 - DNA, 20 bp, synthetic construct
  misc_feature 1..20: note = Description of Artificial Sequence: Synthetic oligonucleotide
  misc_feature 1..20: note = Target: ANGPTL3; (-) strand; PAM type: YTN; PAM sequence: TTA
  source 1..20: mol_type = other DNA
aatggtcaaatagtactgag

SEQ ID NO: 12349 - DNA, 20 bp, synthetic construct
  misc_feature 1..20: note = Description of Artificial Sequence: Synthetic oligonucleotide
  misc_feature 1..20: note = Target: ANGPTL3; (-) strand; PAM type: YTN; PAM sequence: TTT
  source 1..20: mol_type = other DNA
aaatggtcaaatagtactga

SEQ ID NO: 12350 - DNA, 20 bp, synthetic construct
  misc_feature 1..20: note = Description of Artificial Sequence: Synthetic oligonucleotide
  misc_feature 1..20: note = Target: ANGPTL3; (-) strand; PAM type: YTN; PAM sequence: TTT
  source 1..20: mol_type = other DNA
taaatggtcaaatagtactg

SEQ ID NO: 12351 - DNA, 20 bp, synthetic construct
  misc_feature 1..20: note = Description of Artificial Sequence: Synthetic oligonucleotide
  misc_feature 1..20: note = Target: ANGPTL3; (-) strand; PAM type: YTN; PAM sequence: TTT
  source 1..20: mol_type = other DNA
ttaaatggtcaaatagtact

SEQ ID NO: 12352 - DNA, 20 bp, synthetic construct
  misc_feature 1..20: note = Description of Artificial Sequence: Synthetic oligonucleotide
  misc_feature 1..20: note = Target: ANGPTL3; (-) strand; PAM type: YTN; PAM sequence: TTG
  source 1..20: mol_type = other DNA
aatacaaaatttttaaatgg

SEQ ID NO: 12353 - DNA, 20 bp, synthetic construct
  misc_feature 1..20: note = Description of Artificial Sequence: Synthetic oligonucleotide
  misc_feature 1..20: note = Target: ANGPTL3; (-) strand; PAM type: YTN; PAM sequence: TTT
  source 1..20: mol_type = other DNA
gaatacaaaatttttaaatg

SEQ ID NO: 12354 - DNA, 20 bp, synthetic construct
  misc_feature 1..20: note = Description of Artificial Sequence: Synthetic oligonucleotide
  misc_feature 1..20: note = Target: ANGPTL3; (-) strand; PAM type: YTN; PAM sequence: CTG
  source 1..20: mol_type = other DNA
gtagtttgaatacaaaattt

SEQ ID NO: 12355 - DNA, 20 bp, synthetic construct
  misc_feature 1..20: note = Description of Artificial Sequence: Synthetic oligonucleotide
  misc_feature 1..20: note = Target: ANGPTL3; (-) strand; PAM type: YTN; PAM sequence: TTC
  source 1..20: mol_type = other DNA
actggtagtttgaatacaaa

SEQ ID NO: 12356 - DNA, 20 bp, synthetic construct
  misc_feature 1..20: note = Description of Artificial Sequence: Synthetic oligonucleotide
  misc_feature 1..20: note = Target: ANGPTL3; (-) strand; PAM type: YTN; PAM sequence: TTT
  source 1..20: mol_type = other DNA
cactggtagtttgaatacaa

SEQ ID NO: 12357 - DNA, 20 bp, synthetic construct
  misc_feature 1..20: note = Description of Artificial Sequence: Synthetic oligonucleotide
  misc_feature 1..20: note = Target: ANGPTL3; (-) strand; PAM type: YTN; PAM sequence: CTT
  source 1..20: mol_type = other DNA
tcactggtagtttgaataca

SEQ ID NO: 12358 - DNA, 20 bp, synthetic construct
  misc_feature 1..20: note = Description of Artificial Sequence: Synthetic oligonucleotide
  misc_feature 1..20: note = Target: ANGPTL3; (-) strand; PAM type: YTN; PAM sequence: CTA
  source 1..20: mol_type = other DNA
ggtagggctttcactggtag

SEQ ID NO: 12359 - DNA, 20 bp, synthetic construct
  misc_feature 1..20: note = Description of Artificial Sequence: Synthetic oligonucleotide
  misc_feature 1..20: note = Target: ANGPTL3; (-) strand; PAM type: YTN; PAM sequence: TTC
  source 1..20: mol_type = other DNA
taggtagggctttcactggt

SEQ ID NO: 12360 - DNA, 20 bp, synthetic construct
  misc_feature 1..20: note = Description of Artificial Sequence: Synthetic oligonucleotide
  misc_feature 1..20: note = Target: ANGPTL3; (-) strand; PAM type: YTN; PAM sequence: CTT
  source 1..20: mol_type = other DNA
ctaggtagggctttcactgg

SEQ ID NO: 12361 - DNA, 20 bp, synthetic construct
  misc_feature 1..20: note = Description of Artificial Sequence: Synthetic oligonucleotide
  misc_feature 1..20: note = Target: ANGPTL3; (-) strand; PAM type: YTN; PAM sequence: CTG
  source 1..20: mol_type = other DNA
agtataccttctaggtaggg

SEQ ID NO: 12362 - DNA, 20 bp, synthetic construct
  misc_feature 1..20: note = Description of Artificial Sequence: Synthetic oligonucleotide
  misc_feature 1..20: note = Target: ANGPTL3; (-) strand; PAM type: YTN; PAM sequence: TTA
  source 1..20: mol_type = other DNA
tcactgagtataccttctag

SEQ ID NO: 12363 - DNA, 20 bp, synthetic construct
  misc_feature 1..20: note = Description of Artificial Sequence: Synthetic oligonucleotide
  misc_feature 1..20: note = Target: ANGPTL3; (-) strand; PAM type: YTN; PAM sequence: CTT
  source 1..20: mol_type = other DNA
atcactgagtataccttcta

SEQ ID NO: 12364 - DNA, 20 bp, synthetic construct
  misc_feature 1..20: note = Description of Artificial Sequence: Synthetic oligonucleotide
  misc_feature 1..20: note = Target: ANGPTL3; (-) strand; PAM type: YTN; PAM sequence: CTA
  source 1..20: mol_type = other DNA
caaaacttatcactgagtat

SEQ ID NO: 12365 - DNA, 20 bp, synthetic construct
  misc_feature 1..20: note = Description of Artificial Sequence: Synthetic oligonucleotide
  misc_feature 1..20: note = Target: ANGPTL3; (-) strand; PAM type: YTN; PAM sequence: TTG
  source 1..20: mol_type = other DNA
gagctacaaaacttatcact

SEQ ID NO: 12366 - DNA, 20 bp, synthetic construct
  misc_feature 1..20: note = Description of Artificial Sequence: Synthetic oligonucleotide
  misc_feature 1..20: note = Target: ANGPTL3; (-) strand; PAM type: YTN; PAM sequence: TTT
  source 1..20: mol_type = other DNA
ggagctacaaaacttatcac

SEQ ID NO: 12367 - DNA, 20 bp, synthetic construct
  misc_feature 1..20: note = Description of Artificial Sequence: Synthetic oligonucleotide
  misc_feature 1..20: note = Target: ANGPTL3; (-) strand; PAM type: YTN; PAM sequence: TTA
  source 1..20: mol_type = other DNA
gaagatttggagctacaaaa

SEQ ID NO: 12368 - DNA, 20 bp, synthetic construct
  misc_feature 1..20: note = Description of Artificial Sequence: Synthetic oligonucleotide
  misc_feature 1..20: note = Target: ANGPTL3; (-) strand; PAM type: YTN; PAM sequence: CTA
  source 1..20: mol_type = other DNA
ttagaagatttggagctaca

SEQ ID NO: 12369 - DNA, 20 bp, synthetic construct
  misc_feature 1..20: note = Description of Artificial Sequence: Synthetic oligonucleotide
  misc_feature 1..20: note = Target: ANGPTL3; (-) strand; PAM type: YTN; PAM sequence: CTC
  source 1..20: mol_type = other DNA
actattagaagatttggagc

SEQ ID NO: 12370 - DNA, 20 bp, synthetic construct
  misc_feature 1..20: note = Description of Artificial Sequence: Synthetic oligonucleotide
  misc_feature 1..20: note = Target: ANGPTL3; (-) strand; PAM type: YTN; PAM sequence: TTA
  source 1..20: mol_type = other DNA
cactcactattagaagattt

SEQ ID NO: 12371 - DNA, 20 bp, synthetic construct
  misc_feature 1..20: note = Description of Artificial Sequence: Synthetic oligonucleotide
  misc_feature 1..20: note = Target: ANGPTL3; (-) strand; PAM type: YTN; PAM sequence: TTG
  source 1..20: mol_type = other DNA
gggttacactcactattaga

SEQ ID NO: 12372 - DNA, 20 bp, synthetic construct
  misc_feature 1..20: note = Description of Artificial Sequence: Synthetic oligonucleotide
  misc_feature 1..20: note = Target: ANGPTL3; (-) strand; PAM type: YTN; PAM sequence: TTT
  source 1..20: mol_type = other DNA
ggggttacactcactattag

SEQ ID NO: 12373 - DNA, 20 bp, synthetic construct
  misc_feature 1..20: note = Description of Artificial Sequence: Synthetic oligonucleotide
  misc_feature 1..20: note = Target: ANGPTL3; (-) strand; PAM type: YTN; PAM sequence: TTT
  source 1..20: mol_type = other DNA
tggggttacactcactatta

SEQ ID NO: 12374 - DNA, 20 bp, synthetic construct
  misc_feature 1..20: note = Description of Artificial Sequence: Synthetic oligonucleotide
  misc_feature 1..20: note = Target: ANGPTL3; (-) strand; PAM type: YTN; PAM sequence: TTA
  source 1..20: mol_type = other DNA
ttttggggttacactcacta

SEQ ID NO: 12375 - DNA, 20 bp, synthetic construct
  misc_feature 1..20: note = Description of Artificial Sequence: Synthetic oligonucleotide
  misc_feature 1..20: note = Target: ANGPTL3; (-) strand; PAM type: YTN; PAM sequence: TTT
  source 1..20: mol_type = other DNA
attttggggttacactcact

SEQ ID NO: 12376 - DNA, 20 bp, synthetic construct
  misc_feature 1..20: note = Description of Artificial Sequence: Synthetic oligonucleotide
  misc_feature 1..20: note = Target: ANGPTL3; (-) strand; PAM type: YTN; PAM sequence: TTT
  source 1..20: mol_type = other DNA
tattttggggttacactcac

SEQ ID NO: 12377 - DNA, 20 bp, synthetic construct
  misc_feature 1..20: note = Description of Artificial Sequence: Synthetic oligonucleotide
  misc_feature 1..20: note = Target: ANGPTL3; (-) strand; PAM type: YTN; PAM sequence: CTT
  source 1..20: mol_type = other DNA
ttattttggggttacactca

SEQ ID NO: 12378 - DNA, 20 bp, synthetic construct
  misc_feature 1..20: note = Description of Artificial Sequence: Synthetic oligonucleotide
  misc_feature 1..20: note = Target: ANGPTL3; (-) strand; PAM type: YTN; PAM sequence: CTG
  source 1..20: mol_type = other DNA
tcagccttttattttggggt

SEQ ID NO: 12379 - DNA, 20 bp, synthetic construct
  misc_feature 1..20: note = Description of Artificial Sequence: Synthetic oligonucleotide
  misc_feature 1..20: note = Target: ANGPTL3; (-) strand; PAM type: YTN; PAM sequence: TTA
  source 1..20: mol_type = other DNA
cctgtcagccttttattttg

SEQ ID NO: 12380 - DNA, 20 bp, synthetic construct
  misc_feature 1..20: note = Description of Artificial Sequence: Synthetic oligonucleotide
  misc_feature 1..20: note = Target: ANGPTL3; (-) strand; PAM type: YTN; PAM sequence: CTT
  source 1..20: mol_type = other DNA
acctgtcagccttttatttt

SEQ ID NO: 12381 - DNA, 20 bp, synthetic construct
  misc_feature 1..20: note = Description of Artificial Sequence: Synthetic oligonucleotide
  misc_feature 1..20: note = Target: ANGPTL3; (-) strand; PAM type: YTN; PAM sequence: CTC
  source 1..20: mol_type = other DNA
gacttacctgtcagcctttt

SEQ ID NO: 12382 - DNA, 20 bp, synthetic construct
  misc_feature 1..20: note = Description of Artificial Sequence: Synthetic oligonucleotide
  misc_feature 1..20: note = Target: ANGPTL3; (-) strand; PAM type: YTN; PAM sequence: TTC
  source 1..20: mol_type = other DNA
tcgacttacctgtcagcctt

SEQ ID NO: 12383 - DNA, 20 bp, synthetic construct
  misc_feature 1..20: note = Description of Artificial Sequence: Synthetic oligonucleotide
  misc_feature 1..20: note = Target: ANGPTL3; (-) strand; PAM type: YTN; PAM sequence: TTA
  source 1..20: mol_type = other DNA
agtgagtattctcgacttac

SEQ ID NO: 12384 - DNA, 20 bp, synthetic construct
  misc_feature 1..20: note = Description of Artificial Sequence: Synthetic oligonucleotide
  misc_feature 1..20: note = Target: ANGPTL3; (-) strand; PAM type: YTN; PAM sequence: TTA
  source 1..20: mol_type = other DNA
ccagaattaagtgagtattc

SEQ ID NO: 12385 - DNA, 20 bp, synthetic construct
  misc_feature 1..20: note = Description of Artificial Sequence: Synthetic oligonucleotide
  misc_feature 1..20: note = Target: ANGPTL3; (-) strand; PAM type: YTN; PAM sequence: CTT
  source 1..20: mol_type = other DNA
accagaattaagtgagtatt

SEQ ID NO: 12386 - DNA, 20 bp, synthetic construct
  misc_feature 1..20: note = Description of Artificial Sequence: Synthetic oligonucleotide
  misc_feature 1..20: note = Target: ANGPTL3; (-) strand; PAM type: YTN; PAM sequence: TTC
  source 1..20: mol_type = other DNA
ttaccagaattaagtgagta

SEQ ID NO: 12387 - DNA, 20 bp, synthetic construct
  misc_feature 1..20: note = Description of Artificial Sequence: Synthetic oligonucleotide
  misc_feature 1..20: note = Target: ANGPTL3; (-) strand; PAM type: YTN; PAM sequence: TTT
  source 1..20: mol_type = other DNA
cttaccagaattaagtgagt

SEQ ID NO: 12388 - DNA, 20 bp, synthetic construct
  misc_feature 1..20: note = Description of Artificial Sequence: Synthetic oligonucleotide
  misc_feature 1..20: note = Target: ANGPTL3; (-) strand; PAM type: YTN; PAM sequence: CTT
  source 1..20: mol_type = other DNA
tcttaccagaattaagtgag

SEQ ID NO: 12389 - DNA, 20 bp, synthetic construct
  misc_feature 1..20: note = Description of Artificial Sequence: Synthetic oligonucleotide
  misc_feature 1..20: note = Target: ANGPTL3; (-) strand; PAM type: YTN; PAM sequence: TTG
  source 1..20: mol_type = other DNA
ctttcttaccagaattaagt

SEQ ID NO: 12390 - DNA, 20 bp, synthetic construct
  misc_feature 1..20: note = Description of Artificial Sequence: Synthetic oligonucleotide
  misc_feature 1..20: note = Target: ANGPTL3; (-) strand; PAM type: YTN; PAM sequence: CTG
  source 1..20: mol_type = other DNA
gtaaatacaagtacaaatgg

SEQ ID NO: 12391 - DNA, 20 bp, synthetic construct
  misc_feature 1..20: note = Description of Artificial Sequence: Synthetic oligonucleotide
  misc_feature 1..20: note = Target: ANGPTL3; (-) strand; PAM type: YTN; PAM sequence: TTG
  source 1..20: mol_type = other DNA
ctggtaaatacaagtacaaa

SEQ ID NO: 12392 - DNA, 20 bp, synthetic construct
  misc_feature 1..20: note = Description of Artificial Sequence: Synthetic oligonucleotide
  misc_feature 1..20: note = Target: ANGPTL3; (-) strand; PAM type: YTN; PAM sequence: TTA
  source 1..20: mol_type = other DNA
aggattgctggtaaatacaa

SEQ ID NO: 12393 - DNA, 20 bp, synthetic construct
  misc_feature 1..20: note = Description of Artificial Sequence: Synthetic oligonucleotide
  misc_feature 1..20: note = Target: ANGPTL3; (-) strand; PAM type: YTN; PAM sequence: TTT
  source 1..20: mol_type = other DNA
aaggattgctggtaaataca

SEQ ID NO: 12394 - DNA, 20 bp, synthetic construct
  misc_feature 1..20: note = Description of Artificial Sequence: Synthetic oligonucleotide
  misc_feature 1..20: note = Target: ANGPTL3; (-) strand; PAM type: YTN; PAM sequence: TTT
  source 1..20: mol_type = other DNA
taaggattgctggtaaatac

SEQ ID NO: 12395 - DNA, 20 bp, synthetic construct
  misc_feature 1..20: note = Description of Artificial Sequence: Synthetic oligonucleotide
  misc_feature 1..20: note = Target: ANGPTL3; (-) strand; PAM type: YTN; PAM sequence: TTC
  source 1..20: mol_type = other DNA
attttaaggattgctggtaa

SEQ ID NO: 12396 - DNA, 20 bp, synthetic construct
  misc_feature 1..20: note = Description of Artificial Sequence: Synthetic oligonucleotide
  misc_feature 1..20: note = Target: ANGPTL3; (-) strand; PAM type: YTN; PAM sequence: CTT
  source 1..20: mol_type = other DNA
cattttaaggattgctggta

SEQ ID NO: 12397 - DNA, 20 bp, synthetic construct
  misc_feature 1..20: note = Description of Artificial Sequence: Synthetic oligonucleotide
  misc_feature 1..20: note = Target: ANGPTL3; (-) strand; PAM type: YTN; PAM sequence: TTA
  source 1..20: mol_type = other DNA
gtaggaagcttcattttaag

SEQ ID NO: 12398 - DNA, 20 bp, synthetic construct
  misc_feature 1..20: note = Description of Artificial Sequence: Synthetic oligonucleotide
  misc_feature 1..20: note = Target: ANGPTL3; (-) strand; PAM type: YTN; PAM sequence: TTG
  source 1..20: mol_type = other DNA
agttagtaggaagcttcatt

SEQ ID NO: 12399 - DNA, 20 bp, synthetic construct
  misc_feature 1..20: note = Description of Artificial Sequence: Synthetic oligonucleotide
  misc_feature 1..20: note = Target: ANGPTL3; (-) strand; PAM type: YTN; PAM sequence: CTA
  source 1..20: mol_type = other DNA
ttgagttagtaggaagcttc

SEQ ID NO: 12400 - DNA, 20 bp, synthetic construct
  misc_feature 1..20: note = Description of Artificial Sequence: Synthetic oligonucleotide
  misc_feature 1..20: note = Target: ANGPTL3; (-) strand; PAM type: YTN; PAM sequence: TTG
  source 1..20: mol_type = other DNA
ctattgagttagtaggaagc

SEQ ID NO: 12401 - DNA, 20 bp, synthetic construct
  misc_feature 1..20: note = Description of Artificial Sequence: Synthetic oligonucleotide
  misc_feature 1..20: note = Target: ANGPTL3; (-) strand; PAM type: YTN; PAM sequence: TTA
  source 1..20: mol_type = other DNA
ttgctattgagttagtagga

SEQ ID NO: 12402 - DNA, 20 bp, synthetic construct
  misc_feature 1..20: note = Description of Artificial Sequence: Synthetic oligonucleotide
  misc_feature 1..20: note = Target: ANGPTL3; (-) strand; PAM type: YTN; PAM sequence: CTT
  source 1..20: mol_type = other DNA
attgctattgagttagtagg

SEQ ID NO: 12403 - DNA, 20 bp, synthetic construct
  misc_feature 1..20: note = Description of Artificial Sequence: Synthetic oligonucleotide
  misc_feature 1..20: note = Target: ANGPTL3; (-) strand; PAM type: YTN; PAM sequence: TTG
  source 1..20: mol_type = other DNA
tcttattgctattgagttag

SEQ ID NO: 12404 - DNA, 20 bp, synthetic construct
  misc_feature 1..20: note = Description of Artificial Sequence: Synthetic oligonucleotide
  misc_feature 1..20: note = Target: ANGPTL3; (-) strand; PAM type: YTN; PAM sequence: CTA
  source 1..20: mol_type = other DNA
ttgtcttattgctattgagt

SEQ ID NO: 12405 - DNA, 20 bp, synthetic construct
  misc_feature 1..20: note = Description of Artificial Sequence: Synthetic oligonucleotide
  misc_feature 1..20: note = Target: ANGPTL3; (-) strand; PAM type: YTN; PAM sequence: TTC
  source 1..20: mol_type = other DNA
actattgtcttattgctatt

SEQ ID NO: 12406 - DNA, 20 bp, synthetic construct
  misc_feature 1..20: note = Description of Artificial Sequence: Synthetic oligonucleotide
  misc_feature 1..20: note = Target: ANGPTL3; (-) strand; PAM type: YTN; PAM sequence: TTA
  source 1..20: mol_type = other DNA
aacattcactattgtcttat

SEQ ID NO: 12407 - DNA, 20 bp, synthetic construct
  misc_feature 1..20: note = Description of Artificial Sequence: Synthetic oligonucleotide
  misc_feature 1..20: note = Target: ANGPTL3; (-) strand; PAM type: YTN; PAM sequence: TTC
  source 1..20: mol_type = other DNA
attaaacattcactattgtc

SEQ ID NO: 12408 - DNA, 20 bp, synthetic construct
  misc_feature 1..20: note = Description of Artificial Sequence: Synthetic oligonucleotide
  misc_feature 1..20: note = Target: ANGPTL3; (-) strand; PAM type: YTN; PAM sequence: TTT
  source 1..20: mol_type = other DNA
cattaaacattcactattgt

SEQ ID NO: 12409 - DNA, 20 bp, synthetic construct
  misc_feature 1..20: note = Description of Artificial Sequence: Synthetic oligonucleotide
  misc_feature 1..20: note = Target: ANGPTL3; (-) strand; PAM type: YTN; PAM sequence: TTT
  source 1..20: mol_type = other DNA
tcattaaacattcactattg

SEQ ID NO: 12410 - DNA, 20 bp, synthetic construct
  misc_feature 1..20: note = Description of Artificial Sequence: Synthetic oligonucleotide
  misc_feature 1..20: note = Target: ANGPTL3; (-) strand; PAM type: YTN; PAM sequence: CTG
  source 1..20: mol_type = other DNA
ttttcattaaacattcacta

SEQ ID NO: 12411 - DNA, 20 bp, synthetic construct
  misc_feature 1..20: note = Description of Artificial Sequence: Synthetic oligonucleotide
  misc_feature 1..20: note = Target: ANGPTL3; (-) strand; PAM type: YTN; PAM sequence: TTA
  source 1..20: mol_type = other DNA
taaaatactgttttcattaa

SEQ ID NO: 12412 - DNA, 20 bp, synthetic construct
  misc_feature 1..20: note = Description of Artificial Sequence: Synthetic oligonucleotide
  misc_feature 1..20: note = Target: ANGPTL3; (-) strand; PAM type: YTN; PAM sequence: TTT
  source 1..20: mol_type = other DNA
ataaaatactgttttcatta

SEQ ID NO: 12413 - DNA, 20 bp, synthetic construct
  misc_feature 1..20: note = Description of Artificial Sequence: Synthetic oligonucleotide
  misc_feature 1..20: note = Target: ANGPTL3; (-) strand; PAM type: YTN; PAM sequence: TTA
  source 1..20: mol_type = other DNA
aagtatttataaaatactgt

SEQ ID NO: 12414 - DNA, 20 bp, synthetic construct
  misc_feature 1..20: note = Description of Artificial Sequence: Synthetic oligonucleotide
  misc_feature 1..20: note = Target: ANGPTL3; (-) strand; PAM type: YTN; PAM sequence: TTA
  source 1..20: mol_type = other DNA
ttaaagtatttataaaatac

SEQ ID NO: 12415 - DNA, 20 bp, synthetic construct
  misc_feature 1..20: note = Description of Artificial Sequence: Synthetic oligonucleotide
  misc_feature 1..20: note = Target: ANGPTL3; (-) strand; PAM type: YTN; PAM sequence: TTT
  source 1..20: mol_type = other DNA
attaaagtatttataaaata

SEQ ID NO: 12416 - DNA, 20 bp, synthetic construct
  misc_feature 1..20: note = Description of Artificial Sequence: Synthetic oligonucleotide
  misc_feature 1..20: note = Target: ANGPTL3; (-) strand; PAM type: YTN; PAM sequence: TTT
  source 1..20: mol_type = other DNA
tattaaagtatttataaaat

SEQ ID NO: 12417 - DNA, 20 bp, synthetic construct
  misc_feature 1..20: note = Description of Artificial Sequence: Synthetic oligonucleotide
  misc_feature 1..20: note = Target: ANGPTL3; (-) strand; PAM type: YTN; PAM sequence: TTT
  source 1..20: mol_type = other DNA
ttattaaagtatttataaaa

SEQ ID NO: 12418 - DNA, 20 bp, synthetic construct
  misc_feature 1..20: note = Description of Artificial Sequence: Synthetic oligonucleotide
  misc_feature 1..20: note = Target: ANGPTL3; (-) strand; PAM type: YTN; PAM sequence: CTT
  source 1..20: mol_type = other DNA
tttattaaagtatttataaa

SEQ ID NO: 12419 - DNA, 20 bp, synthetic construct
  misc_feature 1..20: note = Description of Artificial Sequence: Synthetic oligonucleotide
  misc_feature 1..20: note = Target: ANGPTL3; (-) strand; PAM type: YTN; PAM sequence: TTC
  source 1..20: mol_type = other DNA
atcacaatcctttttattaa

SEQ ID NO: 12420 - DNA, 20 bp, synthetic construct
  misc_feature 1..20: note = Description of Artificial Sequence: Synthetic oligonucleotide
  misc_feature 1..20: note = Target: ANGPTL3; (-) strand; PAM type: YTN; PAM sequence: CTT
  source 1..20: mol_type = other DNA
catcacaatcctttttatta

SEQ ID NO: 12421 - DNA, 20 bp, synthetic construct
  misc_feature 1..20: note = Description of Artificial Sequence: Synthetic oligonucleotide
  misc_feature 1..20: note = Target: ANGPTL3; (-) strand; PAM type: YTN; PAM sequence: TTC
  source 1..20: mol_type = other DNA
ttcatcacaatcctttttat

SEQ ID NO: 12422 - DNA, 20 bp, synthetic construct
  misc_feature 1..20: note = Description of Artificial Sequence: Synthetic oligonucleotide
  misc_feature 1..20: note = Target: ANGPTL3; (-) strand; PAM type: YTN; PAM sequence: TTG
  source 1..20: mol_type = other DNA
ttcttcatcacaatcctttt

SEQ ID NO: 12423 - DNA, 20 bp, synthetic construct
  misc_feature 1..20: note = Description of Artificial Sequence: Synthetic oligonucleotide
  misc_feature 1..20: note = Target: ANGPTL3; (-) strand; PAM type: YTN; PAM sequence: TTA
  source 1..20: mol_type = other DNA
aaaacaaataacaaatataa

SEQ ID NO: 12424 - DNA, 20 bp, synthetic construct
  misc_feature 1..20: note = Description of Artificial Sequence: Synthetic oligonucleotide
  misc_feature 1..20: note = Target: ANGPTL3; (-) strand; PAM type: YTN; PAM sequence: TTG
  source 1..20: mol_type = other DNA
gaattaaaaacaaataacaa

SEQ ID NO: 12425 - DNA, 20 bp, synthetic construct
  misc_feature 1..20: note = Description of Artificial Sequence: Synthetic oligonucleotide
  misc_feature 1..20: note = Target: ANGPTL3; (-) strand; PAM type: YTN; PAM sequence: TTA
  source 1..20: mol_type = other DNA
ttggaattaaaaacaaataa

SEQ ID NO: 12426 - DNA, 20 bp, synthetic construct
  misc_feature 1..20: note = Description of Artificial Sequence: Synthetic oligonucleotide
  misc_feature 1..20: note = Target: ANGPTL3; (-) strand; PAM type: YTN; PAM sequence: TTT
  source 1..20: mol_type = other DNA
attggaattaaaaacaaata

SEQ ID NO: 12427 - DNA, 20 bp, synthetic construct
  misc_feature 1..20: note = Description of Artificial Sequence: Synthetic oligonucleotide
  misc_feature 1..20: note = Target: ANGPTL3; (-) strand; PAM type: YTN; PAM sequence: TTT
  source 1..20: mol_type = other DNA
tattggaattaaaaacaaat

SEQ ID NO: 12428 - DNA, 20 bp, synthetic construct
  misc_feature 1..20: note = Description of Artificial Sequence: Synthetic oligonucleotide
  misc_feature 1..20: note = Target: ANGPTL3; (-) strand; PAM type: YTN; PAM sequence: TTT
  source 1..20: mol_type = other DNA
ttattggaattaaaaacaaa

SEQ ID NO: 12429 - DNA, 20 bp, synthetic construct
  misc_feature 1..20: note = Description of Artificial Sequence: Synthetic oligonucleotide
  misc_feature 1..20: note = Target: ANGPTL3; (-) strand; PAM type: YTN; PAM sequence: TTA
  source 1..20: mol_type = other DNA
tttttattggaattaaaaac

SEQ ID NO: 12430 - DNA, 20 bp, synthetic construct
  misc_feature 1..20: note = Description of Artificial Sequence: Synthetic oligonucleotide
  misc_feature 1..20: note = Target: ANGPTL3; (-) strand; PAM type: YTN; PAM sequence: TTA
  source 1..20: mol_type = other DNA
aaaattatttttattggaat

SEQ ID NO: 12431 - DNA, 20 bp, synthetic construct
  misc_feature 1..20: note = Description of Artificial Sequence: Synthetic oligonucleotide
  misc_feature 1..20: note = Target: ANGPTL3; (-) strand; PAM type: YTN; PAM sequence: TTT
  source 1..20: mol_type = other DNA
aaaaattatttttattggaa

SEQ ID NO: 12432 - DNA, 20 bp, synthetic construct
  misc_feature 1..20: note = Description of Artificial Sequence: Synthetic oligonucleotide
  misc_feature 1..20: note = Target: ANGPTL3; (-) strand; PAM type: YTN; PAM sequence: TTT
  source 1..20: mol_type = other DNA
taaaaattatttttattgga

SEQ ID NO: 12433 - DNA, 20 bp, synthetic construct
  misc_feature 1..20: note = Description of Artificial Sequence: Synthetic oligonucleotide
  misc_feature 1..20: note = Target: ANGPTL3; (-) strand; PAM type: YTN; PAM sequence: CTG
  source 1..20: mol_type = other DNA
taattttaaaaattattttt

SEQ ID NO: 12434 - DNA, 20 bp, synthetic construct
  misc_feature 1..20: note = Description of Artificial Sequence: Synthetic oligonucleotide
  misc_feature 1..20: note = Target: ANGPTL3; (-) strand; PAM type: YTN; PAM sequence: TTC
  source 1..20: mol_type = other DNA
tgtaattttaaaaattattt

SEQ ID NO: 12435 - DNA, 20 bp, synthetic construct
  misc_feature 1..20: note = Description of Artificial Sequence: Synthetic oligonucleotide
  misc_feature 1..20: note = Target: ANGPTL3; (-) strand; PAM type: YTN; PAM sequence: TTT
  source 1..20: mol_type = other DNA
ctgtaattttaaaaattatt

SEQ ID NO: 12436 - DNA, 20 bp, synthetic construct
  misc_feature 1..20: note = Description of Artificial Sequence: Synthetic oligonucleotide
  misc_feature 1..20: note = Target: ANGPTL3; (-) strand; PAM type: YTN; PAM sequence: TTT
  source 1..20: mol_type = other DNA
tctgtaattttaaaaattat

SEQ ID NO: 12437 - DNA, 20 bp, synthetic construct
  misc_feature 1..20: note = Description of Artificial Sequence: Synthetic oligonucleotide
  misc_feature 1..20: note = Target: ANGPTL3; (-) strand; PAM type: YTN; PAM sequence: TTT
  source 1..20: mol_type = other DNA
ttctgtaattttaaaaatta

SEQ ID NO: 12438 - DNA, 20 bp, synthetic construct
  misc_feature 1..20: note = Description of Artificial Sequence: Synthetic oligonucleotide
  misc_feature 1..20: note = Target: ANGPTL3; (-) strand; PAM type: YTN; PAM sequence: TTT
  source 1..20: mol_type = other DNA
tttctgtaattttaaaaatt

SEQ ID NO: 12439 - DNA, 20 bp, synthetic construct
  misc_feature 1..20: note = Description of Artificial Sequence: Synthetic oligonucleotide
  misc_feature 1..20: note = Target: ANGPTL3; (-) strand; PAM type: YTN; PAM sequence: CTT
  source 1..20: mol_type = other DNA
ttttctgtaattttaaaaat

SEQ ID NO: 12440 - DNA, 20 bp, synthetic construct
  misc_feature 1..20: note = Description of Artificial Sequence: Synthetic oligonucleotide
  misc_feature 1..20: note = Target: ANGPTL3; (-) strand; PAM type: YTN; PAM sequence: TTA
  source 1..20: mol_type = other DNA
ataacttttttctgtaattt

SEQ ID NO: 12441 - DNA, 20 bp, synthetic construct
  misc_feature 1..20: note = Description of Artificial Sequence: Synthetic oligonucleotide
  misc_feature 1..20: note = Target: ANGPTL3; (-) strand; PAM type: YTN; PAM sequence: CTT
  source 1..20: mol_type = other DNA
aataacttttttctgtaatt

SEQ ID NO: 12442 - DNA, 20 bp, synthetic construct
  misc_feature 1..20: note = Description of Artificial Sequence: Synthetic oligonucleotide
  misc_feature 1..20: note = Target: ANGPTL3; (-) strand; PAM type: YTN; PAM sequence: TTC
  source 1..20: mol_type = other DNA
ttaataacttttttctgtaa

SEQ ID NO: 12443 - DNA, 20 bp, synthetic construct
  misc_feature 1..20: note = Description of Artificial Sequence: Synthetic oligonucleotide
  misc_feature 1..20: note = Target: ANGPTL3; (-) strand; PAM type: YTN; PAM sequence: TTA
  source 1..20: mol_type = other DNA
aaagcatggttcttaataac

SEQ ID NO: 12444 - DNA, 20 bp, synthetic construct
  misc_feature 1..20: note = Description of Artificial Sequence: Synthetic oligonucleotide
  misc_feature 1..20: note = Target: ANGPTL3; (-) strand; PAM type: YTN; PAM sequence: TTT
  source 1..20: mol_type = other DNA
aaaagcatggttcttaataa

SEQ ID NO: 12445 - DNA, 20 bp, synthetic construct
  misc_feature 1..20: note = Description of Artificial Sequence: Synthetic oligonucleotide
  misc_feature 1..20: note = Target: ANGPTL3; (-) strand; PAM type: YTN; PAM sequence: TTA
  source 1..20: mol_type = other DNA
aatttaaaagcatggttctt

SEQ ID NO: 12446 - DNA, 20 bp, synthetic construct
  misc_feature 1..20: note = Description of Artificial Sequence: Synthetic oligonucleotide
  misc_feature 1..20: note = Target: ANGPTL3; (-) strand; PAM type: YTN; PAM sequence: TTT
  source 1..20: mol_type = other DNA
aaatttaaaagcatggttct

SEQ ID NO: 12447 - DNA, 20 bp, synthetic construct
  misc_feature 1..20: note = Description of Artificial Sequence: Synthetic oligonucleotide
  misc_feature 1..20: note = Target: ANGPTL3; (-) strand; PAM type: YTN; PAM sequence: TTT
  source 1..20: mol_type = other DNA
taaatttaaaagcatggttc

SEQ ID NO: 12448 - DNA, 20 bp, synthetic construct
  misc_feature 1..20: note = Description of Artificial Sequence: Synthetic oligonucleotide
  misc_feature 1..20: note = Target: ANGPTL3; (-) strand; PAM type: YTN; PAM sequence: TTA
  source 1..20: mol_type = other DNA
aaaaatcattttaaatttaa

SEQ ID NO: 12449 - DNA, 20 bp, synthetic construct
  misc_feature 1..20: note = Description of Artificial Sequence: Synthetic oligonucleotide
  misc_feature 1..20: note = Target: ANGPTL3; (-) strand; PAM type: YTN; PAM sequence: TTT
  source 1..20: mol_type = other DNA
aaaaaatcattttaaattta

SEQ ID NO: 12450 - DNA, 20 bp, synthetic construct
  misc_feature 1..20: note = Description of Artificial Sequence: Synthetic oligonucleotide
  misc_feature 1..20: note = Target: ANGPTL3; (-) strand; PAM type: YTN; PAM sequence: TTG
  source 1..20: mol_type = other DNA
tagaaaaagacaggaataaa

SEQ ID NO: 12451 - DNA, 20 bp, synthetic construct
  misc_feature 1..20: note = Description of Artificial Sequence: Synthetic oligonucleotide
  misc_feature 1..20: note = Target: ANGPTL3; (-) strand; PAM type: YTN; PAM sequence: TTT
  source 1..20: mol_type = other DNA
gtagaaaaagacaggaataa

SEQ ID NO: 12452 - DNA, 20 bp, synthetic construct
  misc_feature 1..20: note = Description of Artificial Sequence: Synthetic oligonucleotide
  misc_feature 1..20: note = Target: ANGPTL3; (-) strand; PAM type: YTN; PAM sequence: CTT
  source 1..20: mol_type = other DNA
tgtagaaaaagacaggaata

SEQ ID NO: 12453 - DNA, 20 bp, synthetic construct
  misc_feature 1..20: note = Description of Artificial Sequence: Synthetic oligonucleotide
  misc_feature 1..20: note = Target: ANGPTL3; (-) strand; PAM type: YTN; PAM sequence: TTC
  source 1..20: mol_type = other DNA
tttgtagaaaaagacaggaa

SEQ ID NO: 12454 - DNA, 20 bp, synthetic construct
  misc_feature 1..20: note = Description of Artificial Sequence: Synthetic oligonucleotide
  misc_feature 1..20: note = Target: ANGPTL3; (-) strand; PAM type: YTN; PAM sequence: TTT
  source 1..20: mol_type = other DNA
ctttgtagaaaaagacagga

SEQ ID NO: 12455 - DNA, 20 bp, synthetic construct
  misc_feature 1..20: note = Description of Artificial Sequence: Synthetic oligonucleotide
  misc_feature 1..20: note = Target: ANGPTL3; (-) strand; PAM type: YTN; PAM sequence: CTT
  source 1..20: mol_type = other DNA
tctttgtagaaaaagacagg

SEQ ID NO: 12456 - DNA, 20 bp, synthetic construct
  misc_feature 1..20: note = Description of Artificial Sequence: Synthetic oligonucleotide
  misc_feature 1..20: note = Target: ANGPTL3; (-) strand; PAM type: YTN; PAM sequence: TTA
  source 1..20: mol_type = other DNA
atgtatgctttctttgtaga

SEQ ID NO: 12457 - DNA, 20 bp, synthetic construct
  misc_feature 1..20: note = Description of Artificial Sequence: Synthetic oligonucleotide
  misc_feature 1..20: note = Target: ANGPTL3; (-) strand; PAM type: YTN; PAM sequence: CTT
  source 1..20: mol_type = other DNA
aatgtatgctttctttgtag

SEQ ID NO: 12458 - DNA, 20 bp, synthetic construct
  misc_feature 1..20: note = Description of Artificial Sequence: Synthetic oligonucleotide
  misc_feature 1..20: note = Target: ANGPTL3; (-) strand; PAM type: YTN; PAM sequence: TTG
  source 1..20: mol_type = other DNA
cttaatgtatgctttctttg

SEQ ID NO: 12459 - DNA, 20 bp, synthetic construct
  misc_feature 1..20: note = Description of Artificial Sequence: Synthetic oligonucleotide
  misc_feature 1..20: note = Target: ANGPTL3; (-) strand; PAM type: YTN; PAM sequence: TTT
  source 1..20: mol_type = other DNA
gcttaatgtatgctttcttt

SEQ ID NO: 12460 - DNA, 20 bp, synthetic construct
  misc_feature 1..20: note = Description of Artificial Sequence: Synthetic oligonucleotide
  misc_feature 1..20: note = Target: ANGPTL3; (-) strand; PAM type: YTN; PAM sequence: TTG
  source 1..20: mol_type = other DNA
gtatttgcttaatgtatgct

SEQ ID NO: 12461 - DNA, 20 bp, synthetic construct
  misc_feature 1..20: note = Description of Artificial Sequence: Synthetic oligonucleotide
  misc_feature 1..20: note = Target: ANGPTL3; (-) strand; PAM type: YTN; PAM sequence: TTT
  source 1..20: mol_type = other DNA
ggtatttgcttaatgtatgc

SEQ ID NO: 12462 - DNA, 20 bp, synthetic construct
  misc_feature 1..20: note = Description of Artificial Sequence: Synthetic oligonucleotide
  misc_feature 1..20: note = Target: ANGPTL3; (-) strand; PAM type: YTN; PAM sequence: CTT
  source 1..20: mol_type = other DNA
tggtatttgcttaatgtatg

SEQ ID NO: 12463 - DNA, 20 bp, synthetic construct
  misc_feature 1..20: note = Description of Artificial Sequence: Synthetic oligonucleotide
  misc_feature 1..20: note = Target: ANGPTL3; (-) strand; PAM type: YTN; PAM sequence: CTG
  source 1..20: mol_type = other DNA
gcctttggtatttgcttaat

SEQ ID NO: 12464 - DNA, 20 bp, synthetic construct
  misc_feature 1..20: note = Description of Artificial Sequence: Synthetic oligonucleotide
  misc_feature 1..20: note = Target: ANGPTL3; (-) strand; PAM type: YTN; PAM sequence: TTC
  source 1..20: mol_type = other DNA
aaatgtaaacctggcctttg

SEQ ID NO: 12465 - DNA, 20 bp, synthetic construct
  misc_feature 1..20: note = Description of Artificial Sequence: Synthetic oligonucleotide
  misc_feature 1..20: note = Target: ANGPTL3; (-) strand; PAM type: YTN; PAM sequence: CTT
  source 1..20: mol_type = other DNA
caaatgtaaacctggccttt

SEQ ID NO: 12466 - DNA, 20 bp, synthetic construct
  misc_feature 1..20: note = Description of Artificial Sequence: Synthetic oligonucleotide
  misc_feature 1..20: note = Target: ANGPTL3; (-) strand; PAM type: YTN; PAM sequence: TTC
  source 1..20: mol_type = other DNA
ttcaaatgtaaacctggcct

SEQ ID NO: 12467 - DNA, 20 bp, synthetic construct
  misc_feature 1..20: note = Description of Artificial Sequence: Synthetic oligonucleotide
  misc_feature 1..20: note = Target: ANGPTL3; (-) strand; PAM type: YTN; PAM sequence: TTT
  source 1..20: mol_type = other DNA
cttcaaatgtaaacctggcc

SEQ ID NO: 12468 - DNA, 20 bp, synthetic construct
  misc_feature 1..20: note = Description of Artificial Sequence: Synthetic oligonucleotide
  misc_feature 1..20: note = Target: ANGPTL3; (-) strand; PAM type: YTN; PAM sequence: CTT
  source 1..20: mol_type = other DNA
tcttcaaatgtaaacctggc

SEQ ID NO: 12469 - DNA, 20 bp, synthetic construct
  misc_feature 1..20: note = Description of Artificial Sequence: Synthetic oligonucleotide
  misc_feature 1..20: note = Target: ANGPTL3; (-) strand; PAM type: YTN; PAM sequence: TTG
  source 1..20: mol_type = other DNA
agtaataataatgtcacttt

SEQ ID NO: 12470 - DNA, 20 bp, synthetic construct
  misc_feature 1..20: note = Description of Artificial Sequence: Synthetic oligonucleotide
  misc_feature 1..20: note = Target: ANGPTL3; (-) strand; PAM type: YTN; PAM sequence: CTT
  source 1..20: mol_type = other DNA
gagtaataataatgtcactt

SEQ ID NO: 12471 - DNA, 20 bp, synthetic construct
  misc_feature 1..20: note = Description of Artificial Sequence: Synthetic oligonucleotide
  misc_feature 1..20: note = Target: ANGPTL3; (-) strand; PAM type: YTN; PAM sequence: CTA
  source 1..20: mol_type = other DNA
gagacttgagtaataataat

SEQ ID NO: 12472 - DNA, 20 bp, synthetic construct
  misc_feature 1..20: note = Description of Artificial Sequence: Synthetic oligonucleotide
  misc_feature 1..20: note = Target: ANGPTL3; (-) strand; PAM type: YTN; PAM sequence: TTC
  source 1..20: mol_type = other DNA
ctagagacttgagtaataat

SEQ ID NO: 12473 - DNA, 20 bp, synthetic construct
  misc_feature 1..20: note = Description of Artificial Sequence: Synthetic oligonucleotide
  misc_feature 1..20: note = Target: ANGPTL3; (-) strand; PAM type: YTN; PAM sequence: TTA
  source 1..20: mol_type = other DNA
agtattcctagagacttgag

SEQ ID NO: 12474 - DNA, 20 bp, synthetic construct
  misc_feature 1..20: note = Description of Artificial Sequence: Synthetic oligonucleotide
  misc_feature 1..20: note = Target: ANGPTL3; (-) strand; PAM type: YTN; PAM sequence: TTA
  source 1..20: mol_type = other DNA
acatccatatacagtcaaga

SEQ ID NO: 12475 - DNA, 20 bp, synthetic construct
  misc_feature 1..20: note = Description of Artificial Sequence: Synthetic oligonucleotide
  misc_feature 1..20: note = Target: ANGPTL3; (-) strand; PAM type: YTN; PAM sequence: TTA
  source 1..20: mol_type = other DNA
ttaacatccatatacagtca

SEQ ID NO: 12476 - DNA, 20 bp, synthetic construct
  misc_feature 1..20: note = Description of Artificial Sequence: Synthetic oligonucleotide
  misc_feature 1..20: note = Target: ANGPTL3; (-) strand; PAM type: YTN; PAM sequence: TTT
  source 1..20: mol_type = other DNA
attaacatccatatacagtc

SEQ ID NO: 12477 - DNA, 20 bp, synthetic construct
  misc_feature 1..20: note = Description of Artificial Sequence: Synthetic oligonucleotide
  misc_feature 1..20: note = Target: ANGPTL3; (-) strand; PAM type: YTN; PAM sequence: CTA
  source 1..20: mol_type = other DNA
tttattaacatccatataca

SEQ ID NO: 12478 - DNA, 20 bp, synthetic construct
  misc_feature 1..20: note = Description of Artificial Sequence: Synthetic oligonucleotide
  misc_feature 1..20: note = Target: ANGPTL3; (-) strand; PAM type: YTN; PAM sequence: CTG
  source 1..20: mol_type = other DNA
tcagctatttattaacatcc

SEQ ID NO: 12479 - DNA, 20 bp, synthetic construct
  misc_feature 1..20: note = Description of Artificial Sequence: Synthetic oligonucleotide
  misc_feature 1..20: note = Target: ANGPTL3; (-) strand; PAM type: YTN; PAM sequence: TTA
  source 1..20: mol_type = other DNA
ctgtcagctatttattaaca

SEQ ID NO: 12480 - DNA, 20 bp, synthetic construct
  misc_feature 1..20: note = Description of Artificial Sequence: Synthetic oligonucleotide
  misc_feature 1..20: note = Target: ANGPTL3; (-) strand; PAM type: YTN; PAM sequence: TTT
  source 1..20: mol_type = other DNA
actgtcagctatttattaac

SEQ ID NO: 12481 - DNA, 20 bp, synthetic construct
  misc_feature 1..20: note = Description of Artificial Sequence: Synthetic oligonucleotide
  misc_feature 1..20: note = Target: ANGPTL3; (-) strand; PAM type: YTN; PAM sequence: CTT
  source 1..20: mol_type = other DNA
tactgtcagctatttattaa

SEQ ID NO: 12482 - DNA, 20 bp, synthetic construct
  misc_feature 1..20: note = Description of Artificial Sequence: Synthetic oligonucleotide
  misc_feature 1..20: note = Target: ANGPTL3; (-) strand; PAM type: YTN; PAM sequence: TTA
  source 1..20: mol_type = other DNA
tatggataaactttactgtc

SEQ ID NO: 12483 - DNA, 20 bp, synthetic construct
  misc_feature 1..20: note = Description of Artificial Sequence: Synthetic oligonucleotide
  misc_feature 1..20: note = Target: ANGPTL3; (-) strand; PAM type: YTN; PAM sequence: TTT
  source 1..20: mol_type = other DNA
atatggataaactttactgt

SEQ ID NO: 12484 - DNA, 20 bp, synthetic construct
  misc_feature 1..20: note = Description of Artificial Sequence: Synthetic oligonucleotide
  misc_feature 1..20: note = Target: ANGPTL3; (-) strand; PAM type: YTN; PAM sequence: CTT
  source 1..20: mol_type = other DNA
tatatggataaactttactg

SEQ ID NO: 12485 - DNA, 20 bp, synthetic construct
  misc_feature 1..20: note = Description of Artificial Sequence: Synthetic oligonucleotide
  misc_feature 1..20: note = Target: ANGPTL3; (-) strand; PAM type: YTN; PAM sequence: TTG
  source 1..20: mol_type = other DNA
caagtctttatatggataaa

SEQ ID NO: 12486 - DNA, 20 bp, synthetic construct
  misc_feature 1..20: note = Description of Artificial Sequence: Synthetic oligonucleotide
  misc_feature 1..20: note = Target: ANGPTL3; (-) strand; PAM type: YTN; PAM sequence: TTT
  source 1..20: mol_type = other DNA
gcaagtctttatatggataa

SEQ ID NO: 12487 - DNA, 20 bp, synthetic construct
  misc_feature 1..20: note = Description of Artificial Sequence: Synthetic oligonucleotide
  misc_feature 1..20: note = Target: ANGPTL3; (-) strand; PAM type: YTN; PAM sequence: TTG
  source 1..20: mol_type = other DNA
gtagaggaatatttgcaagt

SEQ ID NO: 12488 - DNA, 20 bp, synthetic construct
  misc_feature 1..20: note = Description of Artificial Sequence: Synthetic oligonucleotide
  misc_feature 1..20: note = Target: ANGPTL3; (-) strand; PAM type: YTN; PAM sequence: CTC
  source 1..20: mol_type = other DNA
gtcattggtagaggaatatt

SEQ ID NO: 12489 - DNA, 20 bp, synthetic construct
  misc_feature 1..20: note = Description of Artificial Sequence: Synthetic oligonucleotide
  misc_feature 1..20: note = Target: ANGPTL3; (-) strand; PAM type: YTN; PAM sequence: TTA
  source 1..20: mol_type = other DNA
aagtctcgtcattggtagag

SEQ ID NO: 12490 - DNA, 20 bp, synthetic construct
  misc_feature 1..20: note = Description of Artificial Sequence: Synthetic oligonucleotide
  misc_feature 1..20: note = Target: ANGPTL3; (-) strand; PAM type: YTN; PAM sequence: TTT
  source 1..20: mol_type = other DNA
aaagtctcgtcattggtaga

SEQ ID NO: 12491 - DNA, 20 bp, synthetic construct
  misc_feature 1..20: note = Description of Artificial Sequence: Synthetic oligonucleotide
  misc_feature 1..20: note = Target: ANGPTL3; (-) strand; PAM type: YTN; PAM sequence: TTT
  source 1..20: mol_type = other DNA
taaagtctcgtcattggtag

SEQ ID NO: 12492 - DNA, 20 bp, synthetic construct
  misc_feature 1..20: note = Description of Artificial Sequence: Synthetic oligonucleotide
  misc_feature 1..20: note = Target: ANGPTL3; (-) strand; PAM type: YTN; PAM sequence: TTA
  source 1..20: mol_type = other DNA
tagatattttaaagtctcgt

SEQ ID NO: 12493 - DNA, 20 bp, synthetic construct
  misc_feature 1..20: note = Description of Artificial Sequence: Synthetic oligonucleotide
  misc_feature 1..20: note = Target: ANGPTL3; (-) strand; PAM type: YTN; PAM sequence: TTA
  source 1..20: mol_type = other DNA
ttatagatattttaaagtct

SEQ ID NO: 12494 - DNA, 20 bp, synthetic construct
  misc_feature 1..20: note = Description of Artificial Sequence: Synthetic oligonucleotide
  misc_feature 1..20: note = Target: ANGPTL3; (-) strand; PAM type: YTN; PAM sequence: TTA
  source 1..20: mol_type = other DNA
cattattatagatattttaa

SEQ ID NO: 12495 - DNA, 20 bp, synthetic construct
  misc_feature 1..20: note = Description of Artificial Sequence: Synthetic oligonucleotide
  misc_feature 1..20: note = Target: ANGPTL3; (-) strand; PAM type: YTN; PAM sequence: TTC
  source 1..20: mol_type = other DNA
accagtgaaatgtgttacat

SEQ ID NO: 12496 - DNA, 20 bp, synthetic construct
  misc_feature 1..20: note = Description of Artificial Sequence: Synthetic oligonucleotide
  misc_feature 1..20: note = Target: ANGPTL3; (-) strand; PAM type: YTN; PAM sequence: TTT
  source 1..20: mol_type = other DNA
caccagtgaaatgtgttaca

SEQ ID NO: 12497 - DNA, 20 bp, synthetic construct
  misc_feature 1..20: note = Description of Artificial Sequence: Synthetic oligonucleotide
  misc_feature 1..20: note = Target: ANGPTL3; (-) strand; PAM type: YTN; PAM sequence: CTA
  source 1..20: mol_type = other DNA
taatgcatatgacaagacat

SEQ ID NO: 12498 - DNA, 20 bp, synthetic construct
  misc_feature 1..20: note = Description of Artificial Sequence: Synthetic oligonucleotide
  misc_feature 1..20: note = Target: ANGPTL3; (-) strand; PAM type: YTN; PAM sequence: TTC
  source 1..20: mol_type = other DNA
tataatgcatatgacaagac

SEQ ID NO: 12499 - DNA, 20 bp, synthetic construct
  misc_feature 1..20: note = Description of Artificial Sequence: Synthetic oligonucleotide
  misc_feature 1..20: note = Target: ANGPTL3; (-) strand; PAM type: YTN; PAM sequence: TTT
  source 1..20: mol_type = other DNA
ctataatgcatatgacaaga

SEQ ID NO: 12500 - DNA, 20 bp, synthetic construct
  misc_feature 1..20: note = Description of Artificial Sequence: Synthetic oligonucleotide
  misc_feature 1..20: note = Target: ANGPTL3; (-) strand; PAM type: YTN; PAM sequence: CTT
  source 1..20: mol_type = other DNA
tctataatgcatatgacaag

SEQ ID NO: 12501 - DNA, 20 bp, synthetic construct
  misc_feature 1..20: note = Description of Artificial Sequence: Synthetic oligonucleotide
  misc_feature 1..20: note = Target: ANGPTL3; (-) strand; PAM type: YTN; PAM sequence: TTA
  source 1..20: mol_type = other DNA
tcctttctataatgcatatg

SEQ ID NO: 12502 - DNA, 20 bp, synthetic construct
  misc_feature 1..20: note = Description of Artificial Sequence: Synthetic oligonucleotide
  misc_feature 1..20: note = Target: ANGPTL3; (-) strand; PAM type: YTN; PAM sequence: CTG
  source 1..20: mol_type = other DNA
attatcctttctataatgca

SEQ ID NO: 12503 - DNA, 20 bp, synthetic construct
  misc_feature 1..20: note = Description of Artificial Sequence: Synthetic oligonucleotide
  misc_feature 1..20: note = Target: ANGPTL3; (-) strand; PAM type: YTN; PAM sequence: CTG
  source 1..20: mol_type = other DNA
aaagtctgattatcctttct

SEQ ID NO: 12504 - DNA, 20 bp, synthetic construct
  misc_feature 1..20: note = Description of Artificial Sequence: Synthetic oligonucleotide
  misc_feature 1..20: note = Target: ANGPTL3; (-) strand; PAM type: YTN; PAM sequence: TTA
  source 1..20: mol_type = other DNA
atataactgaaagtctgatt

SEQ ID NO: 12505 - DNA, 20 bp, synthetic construct
  misc_feature 1..20: note = Description of Artificial Sequence: Synthetic oligonucleotide
  misc_feature 1..20: note = Target: ANGPTL3; (-) strand; PAM type: YTN; PAM sequence: TTA
  source 1..20: mol_type = other DNA
aaaatattaatataactgaa

SEQ ID NO: 12506 - DNA, 20 bp, synthetic construct
  misc_feature 1..20: note = Description of Artificial Sequence: Synthetic oligonucleotide
  misc_feature 1..20: note = Target: ANGPTL3; (-) strand; PAM type: YTN; PAM sequence: CTA
  source 1..20: mol_type = other DNA
tgtgcacaaaaatgttaaaa

SEQ ID NO: 12507 - DNA, 20 bp, synthetic construct
  misc_feature 1..20: note = Description of Artificial Sequence: Synthetic oligonucleotide
  misc_feature 1..20: note = Target: ANGPTL3; (-) strand; PAM type: YTN; PAM sequence: TTG
  source 1..20: mol_type = other DNA
aagatagctatgtgcacaaa

SEQ ID NO: 12508 - DNA, 20 bp, synthetic construct
  misc_feature 1..20: note = Description of Artificial Sequence: Synthetic oligonucleotide
  misc_feature 1..20: note = Target: ANGPTL3; (-) strand; PAM type: YTN; PAM sequence: TTA
  source 1..20: mol_type = other DNA
ttgaagatagctatgtgcac

SEQ ID NO: 12509 - DNA, 20 bp, synthetic construct
  misc_feature 1..20: note = Description of Artificial Sequence: Synthetic oligonucleotide
  misc_feature 1..20: note = Target: ANGPTL3; (-) strand; PAM type: YTN; PAM sequence: TTT
  source 1..20: mol_type = other DNA
attgaagatagctatgtgca

SEQ ID NO: 12510 - DNA, 20 bp, synthetic construct
  misc_feature 1..20: note = Description of Artificial Sequence: Synthetic oligonucleotide
  misc_feature 1..20: note = Target: ANGPTL3; (-) strand; PAM type: YTN; PAM sequence: TTT
  source 1..20: mol_type = other DNA
tattgaagatagctatgtgc

SEQ ID NO: 12511 - DNA, 20 bp, synthetic construct
  misc_feature 1..20: note = Description of Artificial Sequence: Synthetic oligonucleotide
  misc_feature 1..20: note = Target: ANGPTL3; (-) strand; PAM type: YTN; PAM sequence: TTA
  source 1..20: mol_type = other DNA
aaacaattttattgaagata

SEQ ID NO: 12512 - DNA, 20 bp, synthetic construct
  misc_feature 1..20: note = Description of Artificial Sequence: Synthetic oligonucleotide
  misc_feature 1..20: note = Target: ANGPTL3; (-) strand; PAM type: YTN; PAM sequence: TTT
  source 1..20: mol_type = other DNA
aaaacaattttattgaagat

SEQ ID NO: 12513 - DNA, 20 bp, synthetic construct
  misc_feature 1..20: note = Description of Artificial Sequence: Synthetic oligonucleotide
  misc_feature 1..20: note = Target: ANGPTL3; (-) strand; PAM type: YTN; PAM sequence: TTT
  source 1..20: mol_type = other DNA
taaaacaattttattgaaga

SEQ ID NO: 12514 - DNA, 20 bp, synthetic construct
  misc_feature 1..20: note = Description of Artificial Sequence: Synthetic oligonucleotide
  misc_feature 1..20: note = Target: ANGPTL3; (-) strand; PAM type: YTN; PAM sequence: CTT
  source 1..20: mol_type = other DNA
ttaaaacaattttattgaag

SEQ ID NO: 12515 - DNA, 20 bp, synthetic construct
  misc_feature 1..20: note = Description of Artificial Sequence: Synthetic oligonucleotide
  misc_feature 1..20: note = Target: ANGPTL3; (-) strand; PAM type: YTN; PAM sequence: TTA
  source 1..20: mol_type = other DNA
aaataataccttttaaaaca

SEQ ID NO: 12516 - DNA, 20 bp, synthetic construct
  misc_feature 1..20: note = Description of Artificial Sequence: Synthetic oligonucleotide
  misc_feature 1..20: note = Target: ANGPTL3; (-) strand; PAM type: YTN; PAM sequence: CTT
  source 1..20: mol_type = other DNA
aaaataataccttttaaaac

SEQ ID NO: 12517 - DNA, 20 bp, synthetic construct
  misc_feature 1..20: note = Description of Artificial Sequence: Synthetic oligonucleotide
  misc_feature 1..20: note = Target: ANGPTL3; (-) strand; PAM type: YTN; PAM sequence: TTA
  source 1..20: mol_type = other DNA
gtgtatcttaaaataatacc

SEQ ID NO: 12518 - DNA, 20 bp, synthetic construct
  misc_feature 1..20: note = Description of Artificial Sequence: Synthetic oligonucleotide
  misc_feature 1..20: note = Target: ANGPTL3; (-) strand; PAM type: YTN; PAM sequence: TTT
  source 1..20: mol_type = other DNA
agtgtatcttaaaataatac

SEQ ID NO: 12519 - DNA, 20 bp, synthetic construct
  misc_feature 1..20: note = Description of Artificial Sequence: Synthetic oligonucleotide
  misc_feature 1..20: note = Target: ANGPTL3; (-) strand; PAM type: YTN; PAM sequence: TTT
  source 1..20: mol_type = other DNA
tagtgtatcttaaaataata

SEQ ID NO: 12520 - DNA, 20 bp, synthetic construct
  misc_feature 1..20: note = Description of Artificial Sequence: Synthetic oligonucleotide
  misc_feature 1..20: note = Target: ANGPTL3; (-) strand; PAM type: YTN; PAM sequence: TTG
  source 1..20: mol_type = other DNA
atcattttagtgtatcttaa

SEQ ID NO: 12521 - DNA, 20 bp, synthetic construct
  misc_feature 1..20: note = Description of Artificial Sequence: Synthetic oligonucleotide
  misc_feature 1..20: note = Target: ANGPTL3; (-) strand; PAM type: YTN; PAM sequence: CTT
  source 1..20: mol_type = other DNA
gatcattttagtgtatctta

SEQ ID NO: 12522 - DNA, 20 bp, synthetic construct
  misc_feature 1..20: note = Description of Artificial Sequence: Synthetic oligonucleotide
  misc_feature 1..20: note = Target: ANGPTL3; (-) strand; PAM type: YTN; PAM sequence: TTG
  source 1..20: mol_type = other DNA
aatcccttgatcattttagt

SEQ ID NO: 12523 - DNA, 20 bp, synthetic construct
  misc_feature 1..20: note = Description of Artificial Sequence: Synthetic oligonucleotide
  misc_feature 1..20: note = Target: ANGPTL3; (-) strand; PAM type: YTN; PAM sequence: CTT
  source 1..20: mol_type = other DNA
gaatcccttgatcattttag

SEQ ID NO: 12524 - DNA, 20 bp, synthetic construct
  misc_feature 1..20: note = Description of Artificial Sequence: Synthetic oligonucleotide
  misc_feature 1..20: note = Target: ANGPTL3; (-) strand; PAM type: YTN; PAM sequence: TTA
  source 1..20: mol_type = other DNA
gtcttgaatcccttgatcat

SEQ ID NO: 12525 - DNA, 20 bp, synthetic construct
  misc_feature 1..20: note = Description of Artificial Sequence: Synthetic oligonucleotide
  misc_feature 1..20: note = Target: ANGPTL3; (-) strand; PAM type: YTN; PAM sequence: TTT
  source 1..20: mol_type = other DNA
agtcttgaatcccttgatca

SEQ ID NO: 12526 - DNA, 20 bp, synthetic construct
  misc_feature 1..20: note = Description of Artificial Sequence: Synthetic oligonucleotide
  misc_feature 1..20: note = Target: ANGPTL3; (-) strand; PAM type: YTN; PAM sequence: TTG
  source 1..20: mol_type = other DNA
tttagtcttgaatcccttga

SEQ ID NO: 12527 - DNA, 20 bp, synthetic construct
  misc_feature 1..20: note = Description of Artificial Sequence: Synthetic oligonucleotide
  misc_feature 1..20: note = Target: ANGPTL3; (-) strand; PAM type: YTN; PAM sequence: TTG
  source 1..20: mol_type = other DNA
agttgtttagtcttgaatcc

SEQ ID NO: 12528 - DNA, 20 bp, synthetic construct
  misc_feature 1..20: note = Description of Artificial Sequence: Synthetic oligonucleotide
  misc_feature 1..20: note = Target: ANGPTL3; (-) strand; PAM type: YTN; PAM sequence: CTA
  source 1..20: mol_type = other DNA
attgagttgtttagtcttga

SEQ ID NO: 12529 - DNA, 20 bp, synthetic construct
  misc_feature 1..20: note = Description of Artificial Sequence: Synthetic oligonucleotide
  misc_feature 1..20: note = Target: ANGPTL3; (-) strand; PAM type: YTN; PAM sequence: TTG
  source 1..20: mol_type = other DNA
gtgcaactaattgagttgtt

SEQ ID NO: 12530 - DNA, 20 bp, synthetic construct
  misc_feature 1..20: note = Description of Artificial Sequence: Synthetic oligonucleotide
  misc_feature 1..20: note = Target: ANGPTL3; (-) strand; PAM type: YTN; PAM sequence: TTA
  source 1..20: mol_type = other DNA
ttggtgcaactaattgagtt

SEQ ID NO: 12531 - DNA, 20 bp, synthetic construct
  misc_feature 1..20: note = Description of Artificial Sequence: Synthetic oligonucleotide
  misc_feature 1..20: note = Target: ANGPTL3; (-) strand; PAM type: YTN; PAM sequence: TTT
  source 1..20: mol_type = other DNA
attggtgcaactaattgagt

SEQ ID NO: 12532 - DNA, 20 bp, synthetic construct
  misc_feature 1..20: note = Description of Artificial Sequence: Synthetic oligonucleotide
  misc_feature 1..20: note = Target: ANGPTL3; (-) strand; PAM type: YTN; PAM sequence: TTT
  source 1..20: mol_type = other DNA
tattggtgcaactaattgag

SEQ ID NO: 12533 - DNA, 20 bp, synthetic construct
  misc_feature 1..20: note = Description of Artificial Sequence: Synthetic oligonucleotide
  misc_feature 1..20: note = Target: ANGPTL3; (-) strand; PAM type: YTN; PAM sequence: TTT
  source 1..20: mol_type = other DNA
ttattggtgcaactaattga

SEQ ID NO: 12534 - DNA, 20 bp, synthetic construct
  misc_feature 1..20: note = Description of Artificial Sequence: Synthetic oligonucleotide
  misc_feature 1..20: note = Target: ANGPTL3; (-) strand; PAM type: YTN; PAM sequence: TTT
  source 1..20: mol_type = other DNA
tttattggtgcaactaattg

SEQ ID NO: 12535 - DNA, 20 bp, synthetic construct
  misc_feature 1..20: note = Description of Artificial Sequence: Synthetic oligonucleotide
  misc_feature 1..20: note = Target: ANGPTL3; (-) strand; PAM type: YTN; PAM sequence: TTA
  source 1..20: mol_type = other DNA
agtgttttttattggtgcaa

SEQ ID NO: 12536 - DNA, 20 bp, synthetic construct
  misc_feature 1..20: note = Description of Artificial Sequence: Synthetic oligonucleotide
  misc_feature 1..20: note = Target: ANGPTL3; (-) strand; PAM type: YTN; PAM sequence: TTT
  source 1..20: mol_type = other DNA
aagtgttttttattggtgca

SEQ ID NO: 12537 - DNA, 20 bp, synthetic construct
  misc_feature 1..20: note = Description of Artificial Sequence: Synthetic oligonucleotide
  misc_feature 1..20: note = Target: ANGPTL3; (-) strand; PAM type: YTN; PAM sequence: TTT
  source 1..20: mol_type = other DNA
taagtgttttttattggtgc

SEQ ID NO: 12538 - DNA, 20 bp, synthetic construct
  misc_feature 1..20: note = Description of Artificial Sequence: Synthetic oligonucleotide
  misc_feature 1..20: note = Target: ANGPTL3; (-) strand; PAM type: YTN; PAM sequence: TTT
  source 1..20: mol_type = other DNA
ttaagtgttttttattggtg

SEQ ID NO: 12539 - DNA, 20 bp, synthetic construct
  misc_feature 1..20: note = Description of Artificial Sequence: Synthetic oligonucleotide
  misc_feature 1..20: note = Target: ANGPTL3; (-) strand; PAM type: YTN; PAM sequence: TTT
  source 1..20: mol_type = other DNA
tttaagtgttttttattggt

SEQ ID NO: 12540 - DNA, 20 bp, synthetic construct
  misc_feature 1..20: note = Description of Artificial Sequence: Synthetic oligonucleotide
  misc_feature 1..20: note = Target: ANGPTL3; (-) strand; PAM type: YTN; PAM sequence: TTT
  source 1..20: mol_type = other DNA
ttttaagtgttttttattgg

SEQ ID NO: 12541 - DNA, 20 bp, synthetic construct
  misc_feature 1..20: note = Description of Artificial Sequence: Synthetic oligonucleotide
  misc_feature 1..20: note = Target: ANGPTL3; (-) strand; PAM type: YTN; PAM sequence: CTG
  source 1..20: mol_type = other DNA
acagtttttttaagtgtttt

SEQ ID NO: 12542 - DNA, 20 bp, synthetic construct
  misc_feature 1..20: note = Description of Artificial Sequence: Synthetic oligonucleotide
  misc_feature 1..20: note = Target: ANGPTL3; (-) strand; PAM type: YTN; PAM sequence: TTG
  source 1..20: mol_type = other DNA
gacactgacagtttttttaa

SEQ ID NO: 12543 - DNA, 20 bp, synthetic construct
  misc_feature 1..20: note = Description of Artificial Sequence: Synthetic oligonucleotide
  misc_feature 1..20: note = Target: ANGPTL3; (-) strand; PAM type: YTN; PAM sequence: TTA
  source 1..20: mol_type = other DNA
agtacaggttggacactgac

SEQ ID NO: 12544 - DNA, 20 bp, synthetic construct
  misc_feature 1..20: note = Description of Artificial Sequence: Synthetic oligonucleotide
  misc_feature 1..20: note = Target: ANGPTL3; (-) strand; PAM type: YTN; PAM sequence: TTA
  source 1..20: mol_type = other DNA
ttaagtacaggttggacact

SEQ ID NO: 12545 - DNA, 20 bp, synthetic construct
  misc_feature 1..20: note = Description of Artificial Sequence: Synthetic oligonucleotide
  misc_feature 1..20: note = Target: ANGPTL3; (-) strand; PAM type: YTN; PAM sequence: CTG
  source 1..20: mol_type = other DNA
tgagttattaagtacaggtt

SEQ ID NO: 12546 - DNA, 20 bp, synthetic construct
  misc_feature 1..20: note = Description of Artificial Sequence: Synthetic oligonucleotide
  misc_feature 1..20: note = Target: ANGPTL3; (-) strand; PAM type: YTN; PAM sequence: TTA
  source 1..20: mol_type = other DNA
aaaatctgtgagttattaag

SEQ ID NO: 12547 - DNA, 20 bp, synthetic construct
  misc_feature 1..20: note = Description of Artificial Sequence: Synthetic oligonucleotide
  misc_feature 1..20: note = Target: ANGPTL3; (-) strand; PAM type: YTN; PAM sequence: TTT
  source 1..20: mol_type = other DNA
aaaaatctgtgagttattaa

SEQ ID NO: 12548 - DNA, 20 bp, synthetic construct
  misc_feature 1..20: note = Description of Artificial Sequence: Synthetic oligonucleotide
  misc_feature 1..20: note = Target: ANGPTL3; (-) strand; PAM type: YTN; PAM sequence: TTT
  source 1..20: mol_type = other DNA
taaaaatctgtgagttatta

SEQ ID NO: 12549 - DNA, 20 bp, synthetic construct
  misc_feature 1..20: note = Description of Artificial Sequence: Synthetic oligonucleotide
  misc_feature 1..20: note = Target: ANGPTL3; (-) strand; PAM type: YTN; PAM sequence: CTG
  source 1..20: mol_type = other DNA
aaaagaaaagttttaaaaat

SEQ ID NO: 12550 - DNA, 20 bp, synthetic construct
  misc_feature 1..20: note = Description of Artificial Sequence: Synthetic oligonucleotide
  misc_feature 1..20: note = Target: ANGPTL3; (-) strand; PAM type: YTN; PAM sequence: CTC
  source 1..20: mol_type = other DNA
ctgaaaagaaaagttttaaa

SEQ ID NO: 12551 - DNA, 20 bp, synthetic construct
  misc_feature 1..20: note = Description of Artificial Sequence: Synthetic oligonucleotide
  misc_feature 1..20: note = Target: ANGPTL3; (-) strand; PAM type: YTN; PAM sequence: TTC
  source 1..20: mol_type = other DNA
tcctgaaaagaaaagtttta

SEQ ID NO: 12552 - DNA, 20 bp, synthetic construct
  misc_feature 1..20: note = Description of Artificial Sequence: Synthetic oligonucleotide
  misc_feature 1..20: note = Target: ANGPTL3; (-) strand; PAM type: YTN; PAM sequence: CTA
  source 1..20: mol_type = other DNA
ggcccaaccaaaattctcct

SEQ ID NO: 12553 - DNA, 20 bp, synthetic construct
  misc_feature 1..20: note = Description of Artificial Sequence: Synthetic oligonucleotide
  misc_feature 1..20: note = Target: ANGPTL3; (-) strand; PAM type: YTN; PAM sequence: CTC
  source 1..20: mol_type = other DNA
taggcccaaccaaaattctc

SEQ ID NO: 12554 - DNA, 20 bp, synthetic construct
  misc_feature 1..20: note = Description of Artificial Sequence: Synthetic oligonucleotide
  misc_feature 1..20: note = Target: ANGPTL3; (-) strand; PAM type: YTN; PAM sequence: TTC
  source 1..20: mol_type = other DNA
tctaggcccaaccaaaattc

SEQ ID NO: 12555 - DNA, 20 bp, synthetic construct
  misc_feature 1..20: note = Description of Artificial Sequence: Synthetic oligonucleotide
  misc_feature 1..20: note = Target: ANGPTL3; (-) strand; PAM type: YTN; PAM sequence: CTT
  source 1..20: mol_type = other DNA
ctctaggcccaaccaaaatt

SEQ ID NO: 12556 - DNA, 20 bp, synthetic construct
  misc_feature 1..20: note = Description of Artificial Sequence: Synthetic oligonucleotide
  misc_feature 1..20: note = Target: ANGPTL3; (-) strand; PAM type: YTN; PAM sequence: CTA
  source 1..20: mol_type = other DNA
tggagtatatcttctctagg

SEQ ID NO: 12557 - DNA, 20 bp, synthetic construct
  misc_feature 1..20: note = Description of Artificial Sequence: Synthetic oligonucleotide
  misc_feature 1..20: note = Target: ANGPTL3; (-) strand; PAM type: YTN; PAM sequence: TTC
  source 1..20: mol_type = other DNA
actatggagtatatcttctc

SEQ ID NO: 12558 - DNA, 20 bp, synthetic construct
  misc_feature 1..20: note = Description of Artificial Sequence: Synthetic oligonucleotide
  misc_feature 1..20: note = Target: ANGPTL3; (-) strand; PAM type: YTN; PAM sequence: CTT
  source 1..20: mol_type = other DNA
cactatggagtatatcttct

SEQ ID NO: 12559 - DNA, 20 bp, synthetic construct
  misc_feature 1..20: note = Description of Artificial Sequence: Synthetic oligonucleotide
  misc_feature 1..20: note = Target: ANGPTL3; (-) strand; PAM type: YTN; PAM sequence: TTG
  source 1..20: mol_type = other DNA
cttcactatggagtatatct

SEQ ID NO: 12560 - DNA, 20 bp, synthetic construct
  misc_feature 1..20: note = Description of Artificial Sequence: Synthetic oligonucleotide
  misc_feature 1..20: note = Target: ANGPTL3; (-) strand; PAM type: YTN; PAM sequence: TTA
  source 1..20: mol_type = other DNA
gattgcttcactatggagta

SEQ ID NO: 12561 - DNA, 20 bp, synthetic construct
  misc_feature 1..20: note = Description of Artificial Sequence: Synthetic oligonucleotide
  misc_feature 1..20: note = Target: ANGPTL3; (-) strand; PAM type: YTN; PAM sequence: TTC
  source 1..20: mol_type = other DNA
gtaaaacataattagattgc

SEQ ID NO: 12562 - DNA, 20 bp, synthetic construct
  misc_feature 1..20: note = Description of Artificial Sequence: Synthetic oligonucleotide
  misc_feature 1..20: note = Target: ANGPTL3; (-) strand; PAM type: YTN; PAM sequence: CTC
  source 1..20: mol_type = other DNA
aattcgtaaaacataattag

SEQ ID NO: 12563 - DNA, 20 bp, synthetic construct
  misc_feature 1..20: note = Description of Artificial Sequence: Synthetic oligonucleotide
  misc_feature 1..20: note = Target: ANGPTL3; (-) strand; PAM type: YTN; PAM sequence: TTC
  source 1..20: mol_type = other DNA
caactcaattcgtaaaacat

SEQ ID NO: 12564 - DNA, 20 bp, synthetic construct
  misc_feature 1..20: note = Description of Artificial Sequence: Synthetic oligonucleotide
  misc_feature 1..20: note = Target: ANGPTL3; (-) strand; PAM type: YTN; PAM sequence: CTT
  source 1..20: mol_type = other DNA
ccaactcaattcgtaaaaca

SEQ ID NO: 12565 - DNA, 20 bp, synthetic construct
  misc_feature 1..20: note = Description of Artificial Sequence: Synthetic oligonucleotide
  misc_feature 1..20: note = Target: ANGPTL3; (-) strand; PAM type: YTN; PAM sequence: TTC
  source 1..20: mol_type = other DNA
cagtcttccaactcaattcg

SEQ ID NO: 12566 - DNA, 20 bp, synthetic construct
  misc_feature 1..20: note = Description of Artificial Sequence: Synthetic oligonucleotide
  misc_feature 1..20: note = Target: ANGPTL3; (-) strand; PAM type: YTN; PAM sequence: TTT
  source 1..20: mol_type = other DNA
ccagtcttccaactcaattc

SEQ ID NO: 12567 - DNA, 20 bp, synthetic construct
  misc_feature 1..20: note = Description of Artificial Sequence: Synthetic oligonucleotide
  misc_feature 1..20: note = Target: ANGPTL3; (-) strand; PAM type: YTN; PAM sequence: CTT
  source 1..20: mol_type = other DNA
tccagtcttccaactcaatt

SEQ ID NO: 12568 - DNA, 20 bp, synthetic construct
  misc_feature 1..20: note = Description of Artificial Sequence: Synthetic oligonucleotide
  misc_feature 1..20: note = Target: ANGPTL3; (-) strand; PAM type: YTN; PAM sequence: TTG
  source 1..20: mol_type = other DNA
tctttccagtcttccaactc

SEQ ID NO: 12569 - DNA, 20 bp, synthetic construct
  misc_feature 1..20: note = Description of Artificial Sequence: Synthetic oligonucleotide
  misc_feature 1..20: note = Target: ANGPTL3; (-) strand; PAM type: YTN; PAM sequence: TTG
  source 1..20: mol_type = other DNA
ttgtctttccagtcttccaa

SEQ ID NO: 12570 - DNA, 20 bp, synthetic construct
  misc_feature 1..20: note = Description of Artificial Sequence: Synthetic oligonucleotide
  misc_feature 1..20: note = Target: ANGPTL3; (-) strand; PAM type: YTN; PAM sequence: TTT
  source 1..20: mol_type = other DNA
gttgtctttccagtcttcca

SEQ ID NO: 12571 - DNA, 20 bp, synthetic construct
  misc_feature 1..20: note = Description of Artificial Sequence: Synthetic oligonucleotide
  misc_feature 1..20: note = Target: ANGPTL3; (-) strand; PAM type: YTN; PAM sequence: TTC
  source 1..20: mol_type = other DNA
aatataatgtttgttgtctt

SEQ ID NO: 12572 - DNA, 20 bp, synthetic construct
  misc_feature 1..20: note = Description of Artificial Sequence: Synthetic oligonucleotide
  misc_feature 1..20: note = Target: ANGPTL3; (-) strand; PAM type: YTN; PAM sequence: TTC
  source 1..20: mol_type = other DNA
ccaagtaaaaagaatattca

SEQ ID NO: 12573 - DNA, 20 bp, synthetic construct
  misc_feature 1..20: note = Description of Artificial Sequence: Synthetic oligonucleotide
  misc_feature 1..20: note = Target: ANGPTL3; (-) strand; PAM type: YTN; PAM sequence: TTT
  source 1..20: mol_type = other DNA
cccaagtaaaaagaatattc

SEQ ID NO: 12574 - DNA, 20 bp, synthetic construct
  misc_feature 1..20: note = Description of Artificial Sequence: Synthetic oligonucleotide
  misc_feature 1..20: note = Target: ANGPTL3; (-) strand; PAM type: YTN; PAM sequence: TTC
  source 1..20: mol_type = other DNA
gtgatttcccaagtaaaaag

SEQ ID NO: 12575 - DNA, 20 bp, synthetic construct
  misc_feature 1..20: note = Description of Artificial Sequence: Synthetic oligonucleotide
  misc_feature 1..20: note = Target: ANGPTL3; (-) strand; PAM type: YTN; PAM sequence: TTT
  source 1..20: mol_type = other DNA
cgtgatttcccaagtaaaaa

SEQ ID NO: 12576 - DNA, 20 bp, synthetic construct
  misc_feature 1..20: note = Description of Artificial Sequence: Synthetic oligonucleotide
  misc_feature 1..20: note = Target: ANGPTL3; (-) strand; PAM type: YTN; PAM sequence: TTG
  source 1..20: mol_type = other DNA
gtttcgtgatttcccaagta

SEQ ID NO: 12577 - DNA, 20 bp, synthetic construct
  misc_feature 1..20: note = Description of Artificial Sequence: Synthetic oligonucleotide
  misc_feature 1..20: note = Target: ANGPTL3; (-) strand; PAM type: YTN; PAM sequence: CTA
  source 1..20: mol_type = other DNA
gatgtagcgtatagttggtt

SEQ ID NO: 12578 - DNA, 20 bp, synthetic construct
  misc_feature 1..20: note = Description of Artificial Sequence: Synthetic oligonucleotide
  misc_feature 1..20: note = Target: ANGPTL3; (-) strand; PAM type: YTN; PAM sequence: TTG
  source 1..20: mol_type = other DNA
ccagtaatcgcaactagatg

SEQ ID NO: 12579 - DNA, 20 bp, synthetic construct
  misc_feature 1..20: note = Description of Artificial Sequence: Synthetic oligonucleotide
  misc_feature 1..20: note = Target: ANGPTL3; (-) strand; PAM type: YTN; PAM sequence: TTG
  source 1..20: mol_type = other DNA
gggacattgccagtaatcgc

SEQ ID NO: 12580 - DNA, 20 bp, synthetic construct
  misc_feature 1..20: note = Description of Artificial Sequence: Synthetic oligonucleotide
  misc_feature 1..20: note = Target: ANGPTL3; (-) strand; PAM type: YTN; PAM sequence: TTG
  source 1..20: mol_type = other DNA
cattggggacattgccagta

SEQ ID NO: 12581 - DNA, 20 bp, synthetic construct
  misc_feature 1..20: note = Description of Artificial Sequence: Synthetic oligonucleotide
  misc_feature 1..20: note = Target: ANGPTL3; (-) strand; PAM type: YTN; PAM sequence: TTC
  source 1..20: mol_type = other DNA
cgggattgcattggggacat

SEQ ID NO: 12582 - DNA, 20 bp, synthetic construct
  misc_feature 1..20: note = Description of Artificial Sequence: Synthetic oligonucleotide
  misc_feature 1..20: note = Target: ANGPTL3; (-) strand; PAM type: YTN; PAM sequence: TTT
  source 1..20: mol_type = other DNA
ccgggattgcattggggaca

SEQ ID NO: 12583 - DNA, 20 bp, synthetic construct
  misc_feature 1..20: note = Description of Artificial Sequence: Synthetic oligonucleotide
  misc_feature 1..20: note = Target: ANGPTL3; (-) strand; PAM type: YTN; PAM sequence: TTT
  source 1..20: mol_type = other DNA
tccgggattgcattggggac

SEQ ID NO: 12584 - DNA, 20 bp, synthetic construct
  misc_feature 1..20: note = Description of Artificial Sequence: Synthetic oligonucleotide
  misc_feature 1..20: note = Target: ANGPTL3; (-) strand; PAM type: YTN; PAM sequence: TTG
  source 1..20: mol_type = other DNA
ttttccgggattgcattggg

SEQ ID NO: 12585 - DNA, 20 bp, synthetic construct
  misc_feature 1..20: note = Description of Artificial Sequence: Synthetic oligonucleotide
  misc_feature 1..20: note = Target: ANGPTL3; (-) strand; PAM type: YTN; PAM sequence: TTT
  source 1..20: mol_type = other DNA
gttttccgggattgcattgg

SEQ ID NO: 12586 - DNA, 20 bp, synthetic construct
  misc_feature 1..20: note = Description of Artificial Sequence: Synthetic oligonucleotide
  misc_feature 1..20: note = Target: ANGPTL3; (-) strand; PAM type: YTN; PAM sequence: CTT
  source 1..20: mol_type = other DNA
tgttttccgggattgcattg

SEQ ID NO: 12587 - DNA, 20 bp, synthetic construct
  misc_feature 1..20: note = Description of Artificial Sequence: Synthetic oligonucleotide
  misc_feature 1..20: note = Target: ANGPTL3; (-) strand; PAM type: YTN; PAM sequence: TTG
  source 1..20: mol_type = other DNA
tgatcccaagtagaaaacac

SEQ ID NO: 12588 - DNA, 20 bp, synthetic construct
  misc_feature 1..20: note = Description of Artificial Sequence: Synthetic oligonucleotide
  misc_feature 1..20: note = Target: ANGPTL3; (-) strand; PAM type: YTN; PAM sequence: TTT
  source 1..20: mol_type = other DNA
gtgatcccaagtagaaaaca

SEQ ID NO: 12589 - DNA, 20 bp, synthetic construct
  misc_feature 1..20: note = Description of Artificial Sequence: Synthetic oligonucleotide
  misc_feature 1..20: note = Target: ANGPTL3; (-) strand; PAM type: YTN; PAM sequence: CTT
  source 1..20: mol_type = other DNA
tgtgatcccaagtagaaaac

SEQ ID NO: 12590 - DNA, 20 bp, synthetic construct
  misc_feature 1..20: note = Description of Artificial Sequence: Synthetic oligonucleotide
  misc_feature 1..20: note = Target: ANGPTL3; (-) strand; PAM type: YTN; PAM sequence: TTG
  source 1..20: mol_type = other DNA
ctttgtgatcccaagtagaa

SEQ ID NO: 12591 - DNA, 20 bp, synthetic construct
  misc_feature 1..20: note = Description of Artificial Sequence: Synthetic oligonucleotide
  misc_feature 1..20: note = Target: ANGPTL3; (-) strand; PAM type: YTN; PAM sequence: TTT
  source 1..20: mol_type = other DNA
gctttgtgatcccaagtaga

SEQ ID NO: 12592 - DNA, 20 bp, synthetic construct
  misc_feature 1..20: note = Description of Artificial Sequence: Synthetic oligonucleotide
  misc_feature 1..20: note = Target: ANGPTL3; (-) strand; PAM type: YTN; PAM sequence: TTT
  source 1..20: mol_type = other DNA
tgctttgtgatcccaagtag

SEQ ID NO: 12593 - DNA, 20 bp, synthetic construct
  misc_feature 1..20: note = Description of Artificial Sequence: Synthetic oligonucleotide
  misc_feature 1..20: note = Target: ANGPTL3; (-) strand; PAM type: YTN; PAM sequence: CTT
  source 1..20: mol_type = other DNA
ttgctttgtgatcccaagta

SEQ ID NO: 12594 - DNA, 20 bp, synthetic construct
  misc_feature 1..20: note = Description of Artificial Sequence: Synthetic oligonucleotide
  misc_feature 1..20: note = Target: ANGPTL3; (-) strand; PAM type: YTN; PAM sequence: TTG
  source 1..20: mol_type = other DNA
aagtgtccttttgctttgtg

SEQ ID NO: 12595 - DNA, 20 bp, synthetic construct
  misc_feature 1..20: note = Description of Artificial Sequence: Synthetic oligonucleotide
  misc_feature 1..20: note = Target: ANGPTL3; (-) strand; PAM type: YTN; PAM sequence: CTG
  source 1..20: mol_type = other DNA
gacagttgaagtgtcctttt

SEQ ID NO: 12596 - DNA, 20 bp, synthetic construct
  misc_feature 1..20: note = Description of Artificial Sequence: Synthetic oligonucleotide
  misc_feature 1..20: note = Target: ANGPTL3; (-) strand; PAM type: YTN; PAM sequence: CTC
  source 1..20: mol_type = other DNA
tggacagttgaagtgtcctt

SEQ ID NO: 12597 - DNA, 20 bp, synthetic construct
  misc_feature 1..20: note = Description of Artificial Sequence: Synthetic oligonucleotide
  misc_feature 1..20: note = Target: ANGPTL3; (-) strand; PAM type: YTN; PAM sequence: CTG
  source 1..20: mol_type = other DNA
aataaccctctggacagttg

SEQ ID NO: 12598 - DNA, 20 bp, synthetic construct
  misc_feature 1..20: note = Description of Artificial Sequence: Synthetic oligonucleotide
  misc_feature 1..20: note = Target: ANGPTL3; (-) strand; PAM type: YTN; PAM sequence: TTG
  source 1..20: mol_type = other DNA
gtatcagaaaaagatacctg

SEQ ID NO: 12599 - DNA, 20 bp, synthetic construct
  misc_feature 1..20: note = Description of Artificial Sequence: Synthetic oligonucleotide
  misc_feature 1..20: note = Target: ANGPTL3; (-) strand; PAM type: YTN; PAM sequence: TTG
  source 1..20: mol_type = other DNA
aagatatgaaaataaagtat

SEQ ID NO: 12600 - DNA, 20 bp, synthetic construct
  misc_feature 1..20: note = Description of Artificial Sequence: Synthetic oligonucleotide
  misc_feature 1..20: note = Target: ANGPTL3; (-) strand; PAM type: YTN; PAM sequence: TTT
  source 1..20: mol_type = other DNA
gaagatatgaaaataaagta

SEQ ID NO: 12601 - DNA, 20 bp, synthetic construct
  misc_feature 1..20: note = Description of Artificial Sequence: Synthetic oligonucleotide
  misc_feature 1..20: note = Target: ANGPTL3; (-) strand; PAM type: YTN; PAM sequence: CTT
  source 1..20: mol_type = other DNA
tgaagatatgaaaataaagt

SEQ ID NO: 12602 - DNA, 20 bp, synthetic construct
  misc_feature 1..20: note = Description of Artificial Sequence: Synthetic oligonucleotide
  misc_feature 1..20: note = Target: ANGPTL3; (-) strand; PAM type: YTN; PAM sequence: CTA
  source 1..20: mol_type = other DNA
ataatgtgggaagatacttt

SEQ ID NO: 12603 - DNA, 20 bp, synthetic construct
  misc_feature 1..20: note = Description of Artificial Sequence: Synthetic oligonucleotide
  misc_feature 1..20: note = Target: ANGPTL3; (-) strand; PAM type: YTN; PAM sequence: TTG
  source 1..20: mol_type = other DNA
cagataatagctaataatgt

SEQ ID NO: 12604 - DNA, 20 bp, synthetic construct
  misc_feature 1..20: note = Description of Artificial Sequence: Synthetic oligonucleotide
  misc_feature 1..20: note = Target: ANGPTL3; (-) strand; PAM type: YTN; PAM sequence: TTG
  source 1..20: mol_type = other DNA
tcattgcagataatagctaa

SEQ ID NO: 12605 - DNA, 20 bp, synthetic construct
  misc_feature 1..20: note = Description of Artificial Sequence: Synthetic oligonucleotide
  misc_feature 1..20: note = Target: ANGPTL3; (-) strand; PAM type: YTN; PAM sequence: TTA
  source 1..20: mol_type = other DNA
aaagttgtcattgcagataa

SEQ ID NO: 12606 - DNA, 20 bp, synthetic construct
  misc_feature 1..20: note = Description of Artificial Sequence: Synthetic oligonucleotide
  misc_feature 1..20: note = Target: ANGPTL3; (-) strand; PAM type: YTN; PAM sequence: TTT
  source 1..20: mol_type = other DNA
aaaagttgtcattgcagata

SEQ ID NO: 12607 - DNA, 20 bp, synthetic construct
  misc_feature 1..20: note = Description of Artificial Sequence: Synthetic oligonucleotide
  misc_feature 1..20: note = Target: ANGPTL3; (-) strand; PAM type: YTN; PAM sequence: TTT
  source 1..20: mol_type = other DNA
taaaagttgtcattgcagat

SEQ ID NO: 12608 - DNA, 20 bp, synthetic construct
  misc_feature 1..20: note = Description of Artificial Sequence: Synthetic oligonucleotide
  misc_feature 1..20: note = Target: ANGPTL3; (-) strand; PAM type: YTN; PAM sequence: TTT
  source 1..20: mol_type = other DNA
ttaaaagttgtcattgcaga

SEQ ID NO: 12609 - DNA, 20 bp, synthetic construct
  misc_feature 1..20: note = Description of Artificial Sequence: Synthetic oligonucleotide
  misc_feature 1..20: note = Target: ANGPTL3; (-) strand; PAM type: YTN; PAM sequence: TTC
  source 1..20: mol_type = other DNA
ggatttttaaaagttgtcat

SEQ ID NO: 12610 - DNA, 20 bp, synthetic construct
  misc_feature 1..20: note = Description of Artificial Sequence: Synthetic oligonucleotide
  misc_feature 1..20: note = Target: ANGPTL3; (-) strand; PAM type: YTN; PAM sequence: TTG
  source 1..20: mol_type = other DNA
ggattcggatttttaaaagt

SEQ ID NO: 12611 - DNA, 20 bp, synthetic construct
  misc_feature 1..20: note = Description of Artificial Sequence: Synthetic oligonucleotide
  misc_feature 1..20: note = Target: ANGPTL3; (-) strand; PAM type: YTN; PAM sequence: TTT
  source 1..20: mol_type = other DNA
gggattcggatttttaaaag

SEQ ID NO: 12612 - DNA, 20 bp, synthetic construct
  misc_feature 1..20: note = Description of Artificial Sequence: Synthetic oligonucleotide
  misc_feature 1..20: note = Target: ANGPTL3; (-) strand; PAM type: YTN; PAM sequence: TTA
  source 1..20: mol_type = other DNA
tttgggattcggatttttaa

SEQ ID NO: 12613 - DNA, 20 bp, synthetic construct
  misc_feature 1..20: note = Description of Artificial Sequence: Synthetic oligonucleotide
  misc_feature 1..20: note = Target: ANGPTL3; (-) strand; PAM type: YTN; PAM sequence: CTT
  source 1..20: mol_type = other DNA
atttgggattcggattttta

SEQ ID NO: 12614 - DNA, 20 bp, synthetic construct
  misc_feature 1..20: note = Description of Artificial Sequence: Synthetic oligonucleotide
  misc_feature 1..20: note = Target: ANGPTL3; (-) strand; PAM type: YTN; PAM sequence: CTA
  source 1..20: mol_type = other DNA
gagagaaaacgcttatttgg

SEQ ID NO: 12615 - DNA, 20 bp, synthetic construct
  misc_feature 1..20: note = Description of Artificial Sequence: Synthetic oligonucleotide
  misc_feature 1..20: note = Target: ANGPTL3; (-) strand; PAM type: YTN; PAM sequence: TTC
  source 1..20: mol_type = other DNA
gtctagagagaaaacgctta

SEQ ID NO: 12616 - DNA, 20 bp, synthetic construct
  misc_feature 1..20: note = Description of Artificial Sequence: Synthetic oligonucleotide
  misc_feature 1..20: note = Target: ANGPTL3; (-) strand; PAM type: YTN; PAM sequence: TTT
  source 1..20: mol_type = other DNA
cgtctagagagaaaacgctt

SEQ ID NO: 12617 - DNA, 20 bp, synthetic construct
  misc_feature 1..20: note = Description of Artificial Sequence: Synthetic oligonucleotide
  misc_feature 1..20: note = Target: ANGPTL3; (-) strand; PAM type: YTN; PAM sequence: TTT
  source 1..20: mol_type = other DNA
tcgtctagagagaaaacgct

SEQ ID NO: 12618 - DNA, 20 bp, synthetic construct
  misc_feature 1..20: note = Description of Artificial Sequence: Synthetic oligonucleotide
  misc_feature 1..20: note = Target: ANGPTL3; (-) strand; PAM type: YTN; PAM sequence: TTA
  source 1..20: mol_type = other DNA
agaggttttcgtctagagag

SEQ ID NO: 12619 - DNA, 20 bp, synthetic construct
  misc_feature 1..20: note = Description of Artificial Sequence: Synthetic oligonucleotide
  misc_feature 1..20: note = Target: ANGPTL3; (-) strand; PAM type: YTN; PAM sequence: TTA
  source 1..20: mol_type = other DNA
tagttaagaggttttcgtct

SEQ ID NO: 12620 - DNA, 20 bp, synthetic construct
  misc_feature 1..20: note = Description of Artificial Sequence: Synthetic oligonucleotide
  misc_feature 1..20: note = Target: ANGPTL3; (-) strand; PAM type: YTN; PAM sequence: TTC
  source 1..20: mol_type = other DNA
attatagttaagaggttttc

SEQ ID NO: 12621 - DNA, 20 bp, synthetic construct
  misc_feature 1..20: note = Description of Artificial Sequence: Synthetic oligonucleotide
  misc_feature 1..20: note = Target: ANGPTL3; (-) strand; PAM type: YTN; PAM sequence: TTT
  source 1..20: mol_type = other DNA
cattatagttaagaggtttt

SEQ ID NO: 12622 - DNA, 20 bp, synthetic construct
  misc_feature 1..20: note = Description of Artificial Sequence: Synthetic oligonucleotide
  misc_feature 1..20: note = Target: ANGPTL3; (-) strand; PAM type: YTN; PAM sequence: CTT
  source 1..20: mol_type = other DNA
tcattatagttaagaggttt

SEQ ID NO: 12623 - DNA, 20 bp, synthetic construct
  misc_feature 1..20: note = Description of Artificial Sequence: Synthetic oligonucleotide
  misc_feature 1..20: note = Target: ANGPTL3; (-) strand; PAM type: YTN; PAM sequence: CTA
  source 1..20: mol_type = other DNA
gaatgaacactttcattata

SEQ ID NO: 12624 - DNA, 20 bp, synthetic construct
  misc_feature 1..20: note = Description of Artificial Sequence: Synthetic oligonucleotide
  misc_feature 1..20: note = Target: ANGPTL3; (-) strand; PAM type: YTN; PAM sequence: TTG
  source 1..20: mol_type = other DNA
aactagaatgaacactttca

SEQ ID NO: 12625 - DNA, 20 bp, synthetic construct
  misc_feature 1..20: note = Description of Artificial Sequence: Synthetic oligonucleotide
  misc_feature 1..20: note = Target: ANGPTL3; (-) strand; PAM type: YTN; PAM sequence: CTG
  source 1..20: mol_type = other DNA
attgaactagaatgaacact

SEQ ID NO: 12626 - DNA, 20 bp, synthetic construct
  misc_feature 1..20: note = Description of Artificial Sequence: Synthetic oligonucleotide
  misc_feature 1..20: note = Target: ANGPTL3; (-) strand; PAM type: YTN; PAM sequence: TTA
  source 1..20: mol_type = other DNA
gaggtaaaatacctgattga

SEQ ID NO: 12627 - DNA, 20 bp, synthetic construct
  misc_feature 1..20: note = Description of Artificial Sequence: Synthetic oligonucleotide
  misc_feature 1..20: note = Target: ANGPTL3; (-) strand; PAM type: YTN; PAM sequence: CTG
  source 1..20: mol_type = other DNA
aggaagattagaggtaaaat

SEQ ID NO: 12628 - DNA, 20 bp, synthetic construct
  misc_feature 1..20: note = Description of Artificial Sequence: Synthetic oligonucleotide
  misc_feature 1..20: note = Target: ANGPTL3; (-) strand; PAM type: YTN; PAM sequence: CTA
  source 1..20: mol_type = other DNA
ccaaaaaatagaaaatctga

SEQ ID NO: 12629 - DNA, 20 bp, synthetic construct
  misc_feature 1..20: note = Description of Artificial Sequence: Synthetic oligonucleotide
  misc_feature 1..20: note = Target: ANGPTL3; (-) strand; PAM type: YTN; PAM sequence: CTA
  source 1..20: mol_type = other DNA
tacactaccaaaaaatagaa

SEQ ID NO: 12630 - DNA, 20 bp, synthetic construct
  misc_feature 1..20: note = Description of Artificial Sequence: Synthetic oligonucleotide
  misc_feature 1..20: note = Target: ANGPTL3; (-) strand; PAM type: YTN; PAM sequence: CTG
  source 1..20: mol_type = other DNA
tataaataatctatacacta

SEQ ID NO: 12631 - DNA, 20 bp, synthetic construct
  misc_feature 1..20: note = Description of Artificial Sequence: Synthetic oligonucleotide
  misc_feature 1..20: note = Target: ANGPTL3; (-) strand; PAM type: YTN; PAM sequence: TTA
  source 1..20: mol_type = other DNA
aataatctgtataaataatc

SEQ ID NO: 12632 - DNA, 20 bp, synthetic construct
  misc_feature 1..20: note = Description of Artificial Sequence: Synthetic oligonucleotide
  misc_feature 1..20: note = Target: ANGPTL3; (-) strand; PAM type: YTN; PAM sequence: TTT
  source 1..20: mol_type = other DNA
aaataatctgtataaataat

SEQ ID NO: 12633 - DNA, 20 bp, synthetic construct
  misc_feature 1..20: note = Description of Artificial Sequence: Synthetic oligonucleotide
  misc_feature 1..20: note = Target: ANGPTL3; (-) strand; PAM type: YTN; PAM sequence: TTT
  source 1..20: mol_type = other DNA
taaataatctgtataaataa

SEQ ID NO: 12634 - DNA, 20 bp, synthetic construct
  misc_feature 1..20: note = Description of Artificial Sequence: Synthetic oligonucleotide
  misc_feature 1..20: note = Target: ANGPTL3; (-) strand; PAM type: YTN; PAM sequence: CTG
  source 1..20: mol_type = other DNA
tataagtcccaattttaaat

SEQ ID NO: 12635 - DNA, 20 bp, synthetic construct
  misc_feature 1..20: note = Description of Artificial Sequence: Synthetic oligonucleotide
  misc_feature 1..20: note = Target: ANGPTL3; (-) strand; PAM type: YTN; PAM sequence: TTA
  source 1..20: mol_type = other DNA
aataatctgtataagtccca

SEQ ID NO: 12636 - DNA, 20 bp, synthetic construct
  misc_feature 1..20: note = Description of Artificial Sequence: Synthetic oligonucleotide
  misc_feature 1..20: note = Target: ANGPTL3; (-) strand; PAM type: YTN; PAM sequence: TTT
  source 1..20: mol_type = other DNA
aaataatctgtataagtccc

SEQ ID NO: 12637 - DNA, 20 bp, synthetic construct
  misc_feature 1..20: note = Description of Artificial Sequence: Synthetic oligonucleotide
  misc_feature 1..20: note = Target: ANGPTL3; (-) strand; PAM type: YTN; PAM sequence: TTT
  source 1..20: mol_type = other DNA
taaataatctgtataagtcc

SEQ ID NO: 12638 - DNA, 20 bp, synthetic construct
  misc_feature 1..20: note = Description of Artificial Sequence: Synthetic oligonucleotide
  misc_feature 1..20: note = Target: ANGPTL3; (-) strand; PAM type: YTN; PAM sequence: TTA
  source 1..20: mol_type = other DNA
gatgcatgtatcccagtttt

SEQ ID NO: 12639 - DNA, 20 bp, synthetic construct
  misc_feature 1..20: note = Description of Artificial Sequence: Synthetic oligonucleotide
  misc_feature 1..20: note = Target: ANGPTL3; (-) strand; PAM type: YTN; PAM sequence: TTT
  source 1..20: mol_type = other DNA
agatgcatgtatcccagttt

SEQ ID NO: 12640 - DNA, 20 bp, synthetic construct
  misc_feature 1..20: note = Description of Artificial Sequence: Synthetic oligonucleotide
  misc_feature 1..20: note = Target: ANGPTL3; (-) strand; PAM type: YTN; PAM sequence: TTT
  source 1..20: mol_type = other DNA
tagatgcatgtatcccagtt

SEQ ID NO: 12641 - DNA, 20 bp, synthetic construct
  misc_feature 1..20: note = Description of Artificial Sequence: Synthetic oligonucleotide
  misc_feature 1..20: note = Target: ANGPTL3; (-) strand; PAM type: YTN; PAM sequence: TTA
  source 1..20: mol_type = other DNA
cagtgttttagatgcatgta

SEQ ID NO: 12642 - DNA, 20 bp, synthetic construct
  misc_feature 1..20: note = Description of Artificial Sequence: Synthetic oligonucleotide
  misc_feature 1..20: note = Target: ANGPTL3; (-) strand; PAM type: YTN; PAM sequence: TTA
  source 1..20: mol_type = other DNA
taaatattacagtgttttag

SEQ ID NO: 12643 - DNA, 20 bp, synthetic construct
  misc_feature 1..20: note = Description of Artificial Sequence: Synthetic oligonucleotide
  misc_feature 1..20: note = Target: ANGPTL3; (-) strand; PAM type: YTN; PAM sequence: CTT
  source 1..20: mol_type = other DNA
ataaatattacagtgtttta

SEQ ID NO: 12644 - DNA, 20 bp, synthetic construct
  misc_feature 1..20: note = Description of Artificial Sequence: Synthetic oligonucleotide
  misc_feature 1..20: note = Target: ANGPTL3; (-) strand; PAM type: YTN; PAM sequence: TTC
  source 1..20: mol_type = other DNA
ttataaatattacagtgttt

SEQ ID NO: 12645 - DNA, 20 bp, synthetic construct
  misc_feature 1..20: note = Description of Artificial Sequence: Synthetic oligonucleotide
  misc_feature 1..20: note = Target: ANGPTL3; (-) strand; PAM type: YTN; PAM sequence: TTT
  source 1..20: mol_type = other DNA
cttataaatattacagtgtt

SEQ ID NO: 12646 - DNA, 20 bp, synthetic construct
  misc_feature 1..20: note = Description of Artificial Sequence: Synthetic oligonucleotide
  misc_feature 1..20: note = Target: ANGPTL3; (-) strand; PAM type: YTN; PAM sequence: CTT
  source 1..20: mol_type = other DNA
tcttataaatattacagtgt

SEQ ID NO: 12647 - DNA, 20 bp, synthetic construct
  misc_feature 1..20: note = Description of Artificial Sequence: Synthetic oligonucleotide
  misc_feature 1..20: note = Target: ANGPTL3; (-) strand; PAM type: YTN; PAM sequence: TTC
  source 1..20: mol_type = other DNA
ctttcttataaatattacag

SEQ ID NO: 12648 - DNA, 20 bp, synthetic construct
  misc_feature 1..20: note = Description of Artificial Sequence: Synthetic oligonucleotide
  misc_feature 1..20: note = Target: ANGPTL3; (-) strand; PAM type: YTN; PAM sequence: CTT
  source 1..20: mol_type = other DNA
cctttcttataaatattaca

SEQ ID NO: 12649 - DNA, 20 bp, synthetic construct
  misc_feature 1..20: note = Description of Artificial Sequence: Synthetic oligonucleotide
  misc_feature 1..20: note = Target: ANGPTL3; (-) strand; PAM type: YTN; PAM sequence: TTA
  source 1..20: mol_type = other DNA
tcttcctttcttataaatat

SEQ ID NO: 12650 - DNA, 20 bp, synthetic construct
  misc_feature 1..20: note = Description of Artificial Sequence: Synthetic oligonucleotide
  misc_feature 1..20: note = Target: ANGPTL3; (-) strand; PAM type: YTN; PAM sequence: TTT
  source 1..20: mol_type = other DNA
atcttcctttcttataaata

SEQ ID NO: 12651 - DNA, 20 bp, synthetic construct
  misc_feature 1..20: note = Description of Artificial Sequence: Synthetic oligonucleotide
  misc_feature 1..20: note = Target: ANGPTL3; (-) strand; PAM type: YTN; PAM sequence: TTC
  source 1..20: mol_type = other DNA
cccgtaagtttatcttcctt

SEQ ID NO: 12652 - DNA, 20 bp, synthetic construct
  misc_feature 1..20: note = Description of Artificial Sequence: Synthetic oligonucleotide
  misc_feature 1..20: note = Target: ANGPTL3; (-) strand; PAM type: YTN; PAM sequence: TTT
  source 1..20: mol_type = other DNA
ccccgtaagtttatcttcct

SEQ ID NO: 12653 - DNA, 20 bp, synthetic construct
  misc_feature 1..20: note = Description of Artificial Sequence: Synthetic oligonucleotide
  misc_feature 1..20: note = Target: ANGPTL3; (-) strand; PAM type: YTN; PAM sequence: CTG
  source 1..20: mol_type = other DNA
tatttccccgtaagtttatc

SEQ ID NO: 12654 - DNA, 20 bp, synthetic construct
  misc_feature 1..20: note = Description of Artificial Sequence: Synthetic oligonucleotide
  misc_feature 1..20: note = Target: ANGPTL3; (-) strand; PAM type: YTN; PAM sequence: TTA
  source 1..20: mol_type = other DNA
ctgtatttccccgtaagttt

SEQ ID NO: 12655 - DNA, 20 bp, synthetic construct
  misc_feature 1..20: note = Description of Artificial Sequence: Synthetic oligonucleotide
  misc_feature 1..20: note = Target: ANGPTL3; (-) strand; PAM type: YTN; PAM sequence: CTG
  source 1..20: mol_type = other DNA
ttactgtatttccccgtaag

SEQ ID NO: 12656 - DNA, 20 bp, synthetic construct
  misc_feature 1..20: note = Description of Artificial Sequence: Synthetic oligonucleotide
  misc_feature 1..20: note = Target: ANGPTL3; (-) strand; PAM type: YTN; PAM sequence: TTA
  source 1..20: mol_type = other DNA
ctgttactgtatttccccgt

SEQ ID NO: 12657 - DNA, 20 bp, synthetic construct
  misc_feature 1..20: note = Description of Artificial Sequence: Synthetic oligonucleotide
  misc_feature 1..20: note = Target: ANGPTL3; (-) strand; PAM type: YTN; PAM sequence: CTC
  source 1..20: mol_type = other DNA
gtatgtagttactgttactg

SEQ ID NO: 12658 - DNA, 20 bp, synthetic construct
  misc_feature 1..20: note = Description of Artificial Sequence: Synthetic oligonucleotide
  misc_feature 1..20: note = Target: ANGPTL3; (-) strand; PAM type: YTN; PAM sequence: TTA
  source 1..20: mol_type = other DNA
atgggtacagactcgtatgt

SEQ ID NO: 12659 - DNA, 20 bp, synthetic construct
  misc_feature 1..20: note = Description of Artificial Sequence: Synthetic oligonucleotide
  misc_feature 1..20: note = Target: ANGPTL3; (-) strand; PAM type: YTN; PAM sequence: TTT
  source 1..20: mol_type = other DNA
aatgggtacagactcgtatg

SEQ ID NO: 12660 - DNA, 20 bp, synthetic construct
  misc_feature 1..20: note = Description of Artificial Sequence: Synthetic oligonucleotide
  misc_feature 1..20: note = Target: ANGPTL3; (-) strand; PAM type: YTN; PAM sequence: CTA
  source 1..20: mol_type = other DNA
aaggagatagatatgcaatt

SEQ ID NO: 12661 - DNA, 20 bp, synthetic construct
  misc_feature 1..20: note = Description of Artificial Sequence: Synthetic oligonucleotide
  misc_feature 1..20: note = Target: ANGPTL3; (-) strand; PAM type: YTN; PAM sequence: CTC
  source 1..20: mol_type = other DNA
ctaaaggagatagatatgca

SEQ ID NO: 12662 - DNA, 20 bp, synthetic construct
  misc_feature 1..20: note = Description of Artificial Sequence: Synthetic oligonucleotide
  misc_feature 1..20: note = Target: ANGPTL3; (-) strand; PAM type: YTN; PAM sequence: CTC
  source 1..20: mol_type = other DNA
atcatgccaccaccagcctc

SEQ ID NO: 12663 - DNA, 20 bp, synthetic construct
  misc_feature 1..20: note = Description of Artificial Sequence: Synthetic oligonucleotide
  misc_feature 1..20: note = Target: ANGPTL3; (-) strand; PAM type: YTN; PAM sequence: CTC
  source 1..20: mol_type = other DNA
cacactcatcatgccaccac

SEQ ID NO: 12664 - DNA, 20 bp, synthetic construct
  misc_feature 1..20: note = Description of Artificial Sequence: Synthetic oligonucleotide
  misc_feature 1..20: note = Target: ANGPTL3; (-) strand; PAM type: YTN; PAM sequence: TTC
  source 1..20: mol_type = other DNA
tccacactcatcatgccacc

SEQ ID NO: 12665 - DNA, 20 bp, synthetic construct
  misc_feature 1..20: note = Description of Artificial Sequence: Synthetic oligonucleotide
  misc_feature 1..20: note = Target: ANGPTL3; (-) strand; PAM type: YTN; PAM sequence: TTT
  source 1..20: mol_type = other DNA
ctccacactcatcatgccac

SEQ ID NO: 12666 - DNA, 20 bp, synthetic construct
  misc_feature 1..20: note = Description of Artificial Sequence: Synthetic oligonucleotide
  misc_feature 1..20: note = Target: ANGPTL3; (-) strand; PAM type: YTN; PAM sequence: TTT
  source 1..20: mol_type = other DNA
tctccacactcatcatgcca

SEQ ID NO: 12667 - DNA, 20 bp, synthetic construct
  misc_feature 1..20: note = Description of Artificial Sequence: Synthetic oligonucleotide
  misc_feature 1..20: note = Target: ANGPTL3; (-) strand; PAM type: YTN; PAM sequence: TTG
  source 1..20: mol_type = other DNA
ttttctccacactcatcatg

SEQ ID NO: 12668 - DNA, 20 bp, synthetic construct
  misc_feature 1..20: note = Description of Artificial Sequence: Synthetic oligonucleotide
  misc_feature 1..20: note = Target: ANGPTL3; (-) strand; PAM type: YTN; PAM sequence: TTA
  source 1..20: mol_type = other DNA
ggttgttttctccacactca

SEQ ID NO: 12669 - DNA, 20 bp, synthetic construct
  misc_feature 1..20: note = Description of Artificial Sequence: Synthetic oligonucleotide
  misc_feature 1..20: note = Target: ANGPTL3; (-) strand; PAM type: YTN; PAM sequence: TTT
  source 1..20: mol_type = other DNA
aggttgttttctccacactc

SEQ ID NO: 12670 - DNA, 20 bp, synthetic construct
  misc_feature 1..20: note = Description of Artificial Sequence: Synthetic oligonucleotide
  misc_feature 1..20: note = Target: ANGPTL3; (-) strand; PAM type: YTN; PAM sequence: TTA
  source 1..20: mol_type = other DNA
ccatttaggttgttttctcc

SEQ ID NO: 12671 - DNA, 20 bp, synthetic construct
  misc_feature 1..20: note = Description of Artificial Sequence: Synthetic oligonucleotide
  misc_feature 1..20: note = Target: ANGPTL3; (-) strand; PAM type: YTN; PAM sequence: TTT
  source 1..20: mol_type = other DNA
accatttaggttgttttctc

SEQ ID NO: 12672 - DNA, 20 bp, synthetic construct
  misc_feature 1..20: note = Description of Artificial Sequence: Synthetic oligonucleotide
  misc_feature 1..20: note = Target: ANGPTL3; (-) strand; PAM type: YTN; PAM sequence: TTA
  source 1..20: mol_type = other DNA
tatttaccatttaggttgtt

SEQ ID NO: 12673 - DNA, 20 bp, synthetic construct
  misc_feature 1..20: note = Description of Artificial Sequence: Synthetic oligonucleotide
  misc_feature 1..20: note = Target: ANGPTL3; (-) strand; PAM type: YTN; PAM sequence: TTG
  source 1..20: mol_type = other DNA
ttatatttaccatttaggtt

SEQ ID NO: 12674 - DNA, 20 bp, synthetic construct
  misc_feature 1..20: note = Description of Artificial Sequence: Synthetic oligonucleotide
  misc_feature 1..20: note = Target: ANGPTL3; (-) strand; PAM type: YTN; PAM sequence: TTT
  source 1..20: mol_type = other DNA
gttatatttaccatttaggt

SEQ ID NO: 12675 - DNA, 20 bp, synthetic construct
  misc_feature 1..20: note = Description of Artificial Sequence: Synthetic oligonucleotide
  misc_feature 1..20: note = Target: ANGPTL3; (-) strand; PAM type: YTN; PAM sequence: TTG
  source 1..20: mol_type = other DNA
gtttgttatatttaccattt

SEQ ID NO: 12676 - DNA, 20 bp, synthetic construct
  misc_feature 1..20: note = Description of Artificial Sequence: Synthetic oligonucleotide
  misc_feature 1..20: note = Target: ANGPTL3; (-) strand; PAM type: YTN; PAM sequence: CTT
  source 1..20: mol_type = other DNA
ggtttgttatatttaccatt

SEQ ID NO: 12677 - DNA, 20 bp, synthetic construct
  misc_feature 1..20: note = Description of Artificial Sequence: Synthetic oligonucleotide
  misc_feature 1..20: note = Target: ANGPTL3; (-) strand; PAM type: YTN; PAM sequence: CTC
  source 1..20: mol_type = other DNA
ttggtttgttatatttacca

SEQ ID NO: 12678 - DNA, 20 bp, synthetic construct
  misc_feature 1..20: note = Description of Artificial Sequence: Synthetic oligonucleotide
  misc_feature 1..20: note = Target: ANGPTL3; (-) strand; PAM type: YTN; PAM sequence: TTG
  source 1..20: mol_type = other DNA
ctcttggtttgttatattta

SEQ ID NO: 12679 - DNA, 20 bp, synthetic construct
  misc_feature 1..20: note = Description of Artificial Sequence: Synthetic oligonucleotide
  misc_feature 1..20: note = Target: ANGPTL3; (-) strand; PAM type: YTN; PAM sequence: TTT
  source 1..20: mol_type = other DNA
gctcttggtttgttatattt

SEQ ID NO: 12680 - DNA, 20 bp, synthetic construct
  misc_feature 1..20: note = Description of Artificial Sequence: Synthetic oligonucleotide
  misc_feature 1..20: note = Target: ANGPTL3; (-) strand; PAM type: YTN; PAM sequence: TTT
  source 1..20: mol_type = other DNA
tgctcttggtttgttatatt

SEQ ID NO: 12681 - DNA, 20 bp, synthetic construct
  misc_feature 1..20: note = Description of Artificial Sequence: Synthetic oligonucleotide
  misc_feature 1..20: note = Target: ANGPTL3; (-) strand; PAM type: YTN; PAM sequence: TTA
  source 1..20: mol_type = other DNA
gattttgctcttggtttgtt

SEQ ID NO: 12682 - DNA, 20 bp, synthetic construct
  misc_feature 1..20: note = Description of Artificial Sequence: Synthetic oligonucleotide
  misc_feature 1..20: note = Target: ANGPTL3; (-) strand; PAM type: YTN; PAM sequence: CTT
  source 1..20: mol_type = other DNA
agattttgctcttggtttgt

SEQ ID NO: 12683 - DNA, 20 bp, synthetic construct
  misc_feature 1..20: note = Description of Artificial Sequence: Synthetic oligonucleotide
  misc_feature 1..20: note = Target: ANGPTL3; (-) strand; PAM type: YTN; PAM sequence: CTG
  source 1..20: mol_type = other DNA
gcttagattttgctcttggt

SEQ ID NO: 12684 - DNA, 20 bp, synthetic construct
  misc_feature 1..20: note = Description of Artificial Sequence: Synthetic oligonucleotide
  misc_feature 1..20: note = Target: ANGPTL3; (-) strand; PAM type: YTN; PAM sequence: CTC
  source 1..20: mol_type = other DNA
tggcttagattttgctcttg

SEQ ID NO: 12685 - DNA, 20 bp, synthetic construct
  misc_feature 1..20: note = Description of Artificial Sequence: Synthetic oligonucleotide
  misc_feature 1..20: note = Target: ANGPTL3; (-) strand; PAM type: YTN; PAM sequence: CTC
  source 1..20: mol_type = other DNA
tctggcttagattttgctct

SEQ ID NO: 12686 - DNA, 20 bp, synthetic construct
  misc_feature 1..20: note = Description of Artificial Sequence: Synthetic oligonucleotide
  misc_feature 1..20: note = Target: ANGPTL3; (-) strand; PAM type: YTN; PAM sequence: CTC
  source 1..20: mol_type = other DNA
ctctctggcttagattttgc

SEQ ID NO: 12687 - DNA, 20 bp, synthetic construct
  misc_feature 1..20: note = Description of Artificial Sequence: Synthetic oligonucleotide
  misc_feature 1..20: note = Target: ANGPTL3; (-) strand; PAM type: YTN; PAM sequence: TTC
  source 1..20: mol_type = other DNA
tcctctctggcttagatttt

SEQ ID NO: 12688 - DNA, 20 bp, synthetic construct
  misc_feature 1..20: note = Description of Artificial Sequence: Synthetic oligonucleotide
  misc_feature 1..20: note = Target: ANGPTL3; (-) strand; PAM type: YTN; PAM sequence: CTT
  source 1..20: mol_type = other DNA
ctcctctctggcttagattt

SEQ ID NO: 12689 - DNA, 20 bp, synthetic construct
  misc_feature 1..20: note = Description of Artificial Sequence: Synthetic oligonucleotide
  misc_feature 1..20: note = Target: ANGPTL3; (-) strand; PAM type: YTN; PAM sequence: CTC
  source 1..20: mol_type = other DNA
ttctcctctctggcttagat

SEQ ID NO: 12690 - DNA, 20 bp, synthetic construct
  misc_feature 1..20: note = Description of Artificial Sequence: Synthetic oligonucleotide
  misc_feature 1..20: note = Target: ANGPTL3; (-) strand; PAM type: YTN; PAM sequence: TTC
  source 1..20: mol_type = other DNA
caagataatcctcttctcct

SEQ ID NO: 12691 - DNA, 20 bp, synthetic construct
  misc_feature 1..20: note = Description of Artificial Sequence: Synthetic oligonucleotide
  misc_feature 1..20: note = Target: ANGPTL3; (-) strand; PAM type: YTN; PAM sequence: CTT
  source 1..20: mol_type = other DNA
ccaagataatcctcttctcc

SEQ ID NO: 12692 - DNA, 20 bp, synthetic construct
  misc_feature 1..20: note = Description of Artificial Sequence: Synthetic oligonucleotide
  misc_feature 1..20: note = Target: ANGPTL3; (-) strand; PAM type: YTN; PAM sequence: TTG
  source 1..20: mol_type = other DNA
agacttccaagataatcctc

SEQ ID NO: 12693 - DNA, 20 bp, synthetic construct
  misc_feature 1..20: note = Description of Artificial Sequence: Synthetic oligonucleotide
  misc_feature 1..20: note = Target: ANGPTL3; (-) strand; PAM type: YTN; PAM sequence: TTT
  source 1..20: mol_type = other DNA
gagacttccaagataatcct

SEQ ID NO: 12694 - DNA, 20 bp, synthetic construct
  misc_feature 1..20: note = Description of Artificial Sequence: Synthetic oligonucleotide
  misc_feature 1..20: note = Target: ANGPTL3; (-) strand; PAM type: YTN; PAM sequence: TTT
  source 1..20: mol_type = other DNA
tgagacttccaagataatcc

SEQ ID NO: 12695 - DNA, 20 bp, synthetic construct
  misc_feature 1..20: note = Description of Artificial Sequence: Synthetic oligonucleotide
  misc_feature 1..20: note = Target: ANGPTL3; (-) strand; PAM type: YTN; PAM sequence: TTC
  source 1..20: mol_type = other DNA
cattttgagacttccaagat

SEQ ID NO: 12696 - DNA, 20 bp, synthetic construct
  misc_feature 1..20: note = Description of Artificial Sequence: Synthetic oligonucleotide
  misc_feature 1..20: note = Target: ANGPTL3; (-) strand; PAM type: YTN; PAM sequence: CTT
  source 1..20: mol_type = other DNA
ccattttgagacttccaaga

SEQ ID NO: 12697 - DNA, 20 bp, synthetic construct
  misc_feature 1..20: note = Description of Artificial Sequence: Synthetic oligonucleotide
  misc_feature 1..20: note = Target: ANGPTL3; (-) strand; PAM type: YTN; PAM sequence: TTA
  source 1..20: mol_type = other DNA
tagagtataaccttccattt

SEQ ID NO: 12698 - DNA, 20 bp, synthetic construct
  misc_feature 1..20: note = Description of Artificial Sequence: Synthetic oligonucleotide
  misc_feature 1..20: note = Target: ANGPTL3; (-) strand; PAM type: YTN; PAM sequence: TTT
  source 1..20: mol_type = other DNA
atagagtataaccttccatt

SEQ ID NO: 12699 - DNA, 20 bp, synthetic construct
  misc_feature 1..20: note = Description of Artificial Sequence: Synthetic oligonucleotide
  misc_feature 1..20: note = Target: ANGPTL3; (-) strand; PAM type: YTN; PAM sequence: TTT
  source 1..20: mol_type = other DNA
tatagagtataaccttccat

SEQ ID NO: 12700 - DNA, 20 bp, synthetic construct
  misc_feature 1..20: note = Description of Artificial Sequence: Synthetic oligonucleotide
  misc_feature 1..20: note = Target: ANGPTL3; (-) strand; PAM type: YTN; PAM sequence: TTG
  source 1..20: mol_type = other DNA
attttatagagtataacctt

SEQ ID NO: 12701 - DNA, 20 bp, synthetic construct
  misc_feature 1..20: note = Description of Artificial Sequence: Synthetic oligonucleotide
  misc_feature 1..20: note = Target: ANGPTL3; (-) strand; PAM type: YTN; PAM sequence: TTG
  source 1..20: mol_type = other DNA
gttgattttatagagtataa

SEQ ID NO: 12702 - DNA, 20 bp, synthetic construct
  misc_feature 1..20: note = Description of Artificial Sequence: Synthetic oligonucleotide
  misc_feature 1..20: note = Target: ANGPTL3; (-) strand; PAM type: YTN; PAM sequence: TTT
  source 1..20: mol_type = other DNA
ggttgattttatagagtata

SEQ ID NO: 12703 - DNA, 20 bp, synthetic construct
  misc_feature 1..20: note = Description of Artificial Sequence: Synthetic oligonucleotide
  misc_feature 1..20: note = Target: ANGPTL3; (-) strand; PAM type: YTN; PAM sequence: TTT
  source 1..20: mol_type = other DNA
tggttgattttatagagtat

SEQ ID NO: 12704 - DNA, 20 bp, synthetic construct
  misc_feature 1..20: note = Description of Artificial Sequence: Synthetic oligonucleotide
  misc_feature 1..20: note = Target: ANGPTL3; (-) strand; PAM type: YTN; PAM sequence: TTG
  source 1..20: mol_type = other DNA
gatggatcaacattttggtt

SEQ ID NO: 12705 - DNA, 20 bp, synthetic construct
  misc_feature 1..20: note = Description of Artificial Sequence: Synthetic oligonucleotide
  misc_feature 1..20: note = Target: ANGPTL3; (-) strand; PAM type: YTN; PAM sequence: CTG
  source 1..20: mol_type = other DNA
ttggatggatcaacattttg

SEQ ID NO: 12706 - DNA, 20 bp, synthetic construct
  misc_feature 1..20: note = Description of Artificial Sequence: Synthetic oligonucleotide
  misc_feature 1..20: note = Target: ANGPTL3; (-) strand; PAM type: YTN; PAM sequence: CTG
  source 1..20: mol_type = other DNA
aatctgttggatggatcaac

SEQ ID NO: 12707 - DNA, 20 bp, synthetic construct
  misc_feature 1..20: note = Description of Artificial Sequence: Synthetic oligonucleotide
  misc_feature 1..20: note = Target: ANGPTL3; (-) strand; PAM type: YTN; PAM sequence: TTC
  source 1..20: mol_type = other DNA
tgaatctgttggatggatca

SEQ ID NO: 12708 - DNA, 20 bp, synthetic construct
  misc_feature 1..20: note = Description of Artificial Sequence: Synthetic oligonucleotide
  misc_feature 1..20: note = Target: ANGPTL3; (-) strand; PAM type: YTN; PAM sequence: TTT
  source 1..20: mol_type = other DNA
ctgaatctgttggatggatc

SEQ ID NO: 12709 - DNA, 20 bp, synthetic construct
  misc_feature 1..20: note = Description of Artificial Sequence: Synthetic oligonucleotide
  misc_feature 1..20: note = Target: ANGPTL3; (-) strand; PAM type: YTN; PAM sequence: CTT
  source 1..20: mol_type = other DNA
tctgaatctgttggatggat

SEQ ID NO: 12710 - DNA, 20 bp, synthetic construct
  misc_feature 1..20: note = Description of Artificial Sequence: Synthetic oligonucleotide
  misc_feature 1..20: note = Target: ANGPTL3; (-) strand; PAM type: YTN; PAM sequence: TTC
  source 1..20: mol_type = other DNA
aaagctttctgaatctgttg

SEQ ID NO: 12711 - DNA, 20 bp, synthetic construct
  misc_feature 1..20: note = Description of Artificial Sequence: Synthetic oligonucleotide
  misc_feature 1..20: note = Target: ANGPTL3; (-) strand; PAM type: YTN; PAM sequence: TTC
  source 1..20: mol_type = other DNA
attcaaagctttctgaatct

SEQ ID NO: 12712 - DNA, 20 bp, synthetic construct
  misc_feature 1..20: note = Description of Artificial Sequence: Synthetic oligonucleotide
  misc_feature 1..20: note = Target: ANGPTL3; (-) strand; PAM type: YTN; PAM sequence: CTC
  source 1..20: mol_type = other DNA
agttcattcaaagctttctg

SEQ ID NO: 12713 - DNA, 20 bp, synthetic construct
  misc_feature 1..20: note = Description of Artificial Sequence: Synthetic oligonucleotide
  misc_feature 1..20: note = Target: ANGPTL3; (-) strand; PAM type: YTN; PAM sequence: TTG
  source 1..20: mol_type = other DNA
cctcagttcattcaaagctt

SEQ ID NO: 12714 - DNA, 20 bp, synthetic construct
  misc_feature 1..20: note = Description of Artificial Sequence: Synthetic oligonucleotide
  misc_feature 1..20: note = Target: ANGPTL3; (-) strand; PAM type: YTN; PAM sequence: TTT
  source 1..20: mol_type = other DNA
gcctcagttcattcaaagct

SEQ ID NO: 12715 - DNA, 20 bp, synthetic construct
  misc_feature 1..20: note = Description of Artificial Sequence: Synthetic oligonucleotide
  misc_feature 1..20: note = Target: ANGPTL3; (-) strand; PAM type: YTN; PAM sequence: TTA
  source 1..20: mol_type = other DNA
aatttgcctcagttcattca

SEQ ID NO: 12716 - DNA, 20 bp, synthetic construct
  misc_feature 1..20: note = Description of Artificial Sequence: Synthetic oligonucleotide
  misc_feature 1..20: note = Target: ANGPTL3; (-) strand; PAM type: YTN; PAM sequence: TTT
  source 1..20: mol_type = other DNA
aaatttgcctcagttcattc

SEQ ID NO: 12717 - DNA, 20 bp, synthetic construct
  misc_feature 1..20: note = Description of Artificial Sequence: Synthetic oligonucleotide
  misc_feature 1..20: note = Target: ANGPTL3; (-) strand; PAM type: YTN; PAM sequence: TTT
  source 1..20: mol_type = other DNA
taaatttgcctcagttcatt

SEQ ID NO: 12718 - DNA, 20 bp, synthetic construct
  misc_feature 1..20: note = Description of Artificial Sequence: Synthetic oligonucleotide
  misc_feature 1..20: note = Target: ANGPTL3; (-) strand; PAM type: YTN; PAM sequence: CTT
  source 1..20: mol_type = other DNA
ttaaatttgcctcagttcat

SEQ ID NO: 12719 - DNA, 20 bp, synthetic construct
  misc_feature 1..20: note = Description of Artificial Sequence: Synthetic oligonucleotide
  misc_feature 1..20: note = Target: ANGPTL3; (-) strand; PAM type: YTN; PAM sequence: TTG
  source 1..20: mol_type = other DNA
ccttttaaatttgcctcagt

SEQ ID NO: 12720 - DNA, 20 bp, synthetic construct
  misc_feature 1..20: note = Description of Artificial Sequence: Synthetic oligonucleotide
  misc_feature 1..20: note = Target: ANGPTL3; (-) strand; PAM type: YTN; PAM sequence: TTA
  source 1..20: mol_type = other DNA
ttgccttttaaatttgcctc

SEQ ID NO: 12721 - DNA, 20 bp, synthetic construct
  misc_feature 1..20: note = Description of Artificial Sequence: Synthetic oligonucleotide
  misc_feature 1..20: note = Target: ANGPTL3; (-) strand; PAM type: YTN; PAM sequence: TTA
  source 1..20: mol_type = other DNA
aattattgccttttaaattt

SEQ ID NO: 12722 - DNA, 20 bp, synthetic construct
  misc_feature 1..20: note = Description of Artificial Sequence: Synthetic oligonucleotide
  misc_feature 1..20: note = Target: ANGPTL3; (-) strand; PAM type: YTN; PAM sequence: TTT
  source 1..20: mol_type = other DNA
aaattattgccttttaaatt

SEQ ID NO: 12723 - DNA, 20 bp, synthetic construct
  misc_feature 1..20: note = Description of Artificial Sequence: Synthetic oligonucleotide
  misc_feature 1..20: note = Target: ANGPTL3; (-) strand; PAM type: YTN; PAM sequence: TTA
  source 1..20: mol_type = other DNA
atgtttaaattattgccttt

SEQ ID NO: 12724 - DNA, 20 bp, synthetic construct
  misc_feature 1..20: note = Description of Artificial Sequence: Synthetic oligonucleotide
  misc_feature 1..20: note = Target: ANGPTL3; (-) strand; PAM type: YTN; PAM sequence: TTG
  source 1..20: mol_type = other DNA
gaatgaggttaatgtttaaa

SEQ ID NO: 12725 - DNA, 20 bp, synthetic construct
  misc_feature 1..20: note = Description of Artificial Sequence: Synthetic oligonucleotide
  misc_feature 1..20: note = Target: ANGPTL3; (-) strand; PAM type: YTN; PAM sequence: CTT
  source 1..20: mol_type = other DNA
ggaatgaggttaatgtttaa

SEQ ID NO: 12726 - DNA, 20 bp, synthetic construct
  misc_feature 1..20: note = Description of Artificial Sequence: Synthetic oligonucleotide
  misc_feature 1..20: note = Target: ANGPTL3; (-) strand; PAM type: YTN; PAM sequence: TTA
  source 1..20: mol_type = other DNA
acttggaatgaggttaatgt

SEQ ID NO: 12727 - DNA, 20 bp, synthetic construct
  misc_feature 1..20: note = Description of Artificial Sequence: Synthetic oligonucleotide
  misc_feature 1..20: note = Target: ANGPTL3; (-) strand; PAM type: YTN; PAM sequence: TTA
  source 1..20: mol_type = other DNA
gaccacattaacttggaatg

SEQ ID NO: 12728 - DNA, 20 bp, synthetic construct
  misc_feature 1..20: note = Description of Artificial Sequence: Synthetic oligonucleotide
  misc_feature 1..20: note = Target: ANGPTL3; (-) strand; PAM type: YTN; PAM sequence: TTA
  source 1..20: mol_type = other DNA
ttagaccacattaacttgga

SEQ ID NO: 12729 - DNA, 20 bp, synthetic construct
  misc_feature 1..20: note = Description of Artificial Sequence: Synthetic oligonucleotide
  misc_feature 1..20: note = Target: ANGPTL3; (-) strand; PAM type: YTN; PAM sequence: TTA
  source 1..20: mol_type = other DNA
ataccagattattagaccac

SEQ ID NO: 12730 - DNA, 20 bp, synthetic construct
  misc_feature 1..20: note = Description of Artificial Sequence: Synthetic oligonucleotide
  misc_feature 1..20: note = Target: ANGPTL3; (-) strand; PAM type: YTN; PAM sequence: TTT
  source 1..20: mol_type = other DNA
aataccagattattagacca

SEQ ID NO: 12731 - DNA, 20 bp, synthetic construct
  misc_feature 1..20: note = Description of Artificial Sequence: Synthetic oligonucleotide
  misc_feature 1..20: note = Target: ANGPTL3; (-) strand; PAM type: YTN; PAM sequence: TTA
  source 1..20: mol_type = other DNA
aggatttaataccagattat

SEQ ID NO: 12732 - DNA, 20 bp, synthetic construct
  misc_feature 1..20: note = Description of Artificial Sequence: Synthetic oligonucleotide
  misc_feature 1..20: note = Target: ANGPTL3; (-) strand; PAM type: YTN; PAM sequence: CTT
  source 1..20: mol_type = other DNA
aaggatttaataccagatta

SEQ ID NO: 12733 - DNA, 20 bp, synthetic construct
  misc_feature 1..20: note = Description of Artificial Sequence: Synthetic oligonucleotide
  misc_feature 1..20: note = Target: ANGPTL3; (-) strand; PAM type: YTN; PAM sequence: CTC
  source 1..20: mol_type = other DNA
ttaaggatttaataccagat

SEQ ID NO: 12734 - DNA, 20 bp, synthetic construct
  misc_feature 1..20: note = Description of Artificial Sequence: Synthetic oligonucleotide
  misc_feature 1..20: note = Target: ANGPTL3; (-) strand; PAM type: YTN; PAM sequence: TTC
  source 1..20: mol_type = other DNA
tcttaaggatttaataccag

SEQ ID NO: 12735 - DNA, 20 bp, synthetic construct
  misc_feature 1..20: note = Description of Artificial Sequence: Synthetic oligonucleotide
  misc_feature 1..20: note = Target: ANGPTL3; (-) strand; PAM type: YTN; PAM sequence: TTT
  source 1..20: mol_type = other DNA
ctcttaaggatttaatacca

SEQ ID NO: 12736 - DNA, 20 bp, synthetic construct
  misc_feature 1..20: note = Description of Artificial Sequence: Synthetic oligonucleotide
  misc_feature 1..20: note = Target: ANGPTL3; (-) strand; PAM type: YTN; PAM sequence: CTT
  source 1..20: mol_type = other DNA
tctcttaaggatttaatacc

SEQ ID NO: 12737 - DNA, 20 bp, synthetic construct
  misc_feature 1..20: note = Description of Artificial Sequence: Synthetic oligonucleotide
  misc_feature 1..20: note = Target: ANGPTL3; (-) strand; PAM type: YTN; PAM sequence: CTC
  source 1..20: mol_type = other DNA
aagctttctcttaaggattt

SEQ ID NO: 12738 - DNA, 20 bp, synthetic construct
  misc_feature 1..20: note = Description of Artificial Sequence: Synthetic oligonucleotide
  misc_feature 1..20: note = Target: ANGPTL3; (-) strand; PAM type: YTN; PAM sequence: TTC
  source 1..20: mol_type = other DNA
tcaagctttctcttaaggat

SEQ ID NO: 12739 - DNA, 20 bp, synthetic construct
  misc_feature 1..20: note = Description of Artificial Sequence: Synthetic oligonucleotide
  misc_feature 1..20: note = Target: ANGPTL3; (-) strand; PAM type: YTN; PAM sequence: TTT
  source 1..20: mol_type = other DNA
ctcaagctttctcttaagga

SEQ ID NO: 12740 - DNA, 20 bp, synthetic construct
  misc_feature 1..20: note = Description of Artificial Sequence: Synthetic oligonucleotide
  misc_feature 1..20: note = Target: ANGPTL3; (-) strand; PAM type: YTN; PAM sequence: CTA
  source 1..20: mol_type = other DNA
tttctcaagctttctcttaa

SEQ ID NO: 12741 - DNA, 20 bp, synthetic construct
  misc_feature 1..20: note = Description of Artificial Sequence: Synthetic oligonucleotide
  misc_feature 1..20: note = Target: ANGPTL3; (-) strand; PAM type: YTN; PAM sequence: TTA
  source 1..20: mol_type = other DNA
agataaaaaaaatctatttc

SEQ ID NO: 12742 - DNA, 20 bp, synthetic construct
  misc_feature 1..20: note = Description of Artificial Sequence: Synthetic oligonucleotide
  misc_feature 1..20: note = Target: ANGPTL3; (-) strand; PAM type: YTN; PAM sequence: TTT
  source 1..20: mol_type = other DNA
aagataaaaaaaatctattt

SEQ ID NO: 12743 - DNA, 20 bp, synthetic construct
  misc_feature 1..20: note = Description of Artificial Sequence: Synthetic oligonucleotide
  misc_feature 1..20: note = Target: ANGPTL3; (-) strand; PAM type: YTN; PAM sequence: CTT
  source 1..20: mol_type = other DNA
taagataaaaaaaatctatt

SEQ ID NO: 12744 - DNA, 20 bp, synthetic construct
  misc_feature 1..20: note = Description of Artificial Sequence: Synthetic oligonucleotide
  misc_feature 1..20: note = Target: ANGPTL3; (-) strand; PAM type: YTN; PAM sequence: TTA
  source 1..20: mol_type = other DNA
aatagacagtgactttaaga

SEQ ID NO: 12745 - DNA, 20 bp, synthetic construct
  misc_feature 1..20: note = Description of Artificial Sequence: Synthetic oligonucleotide
  misc_feature 1..20: note = Target: ANGPTL3; (-) strand; PAM type: YTN; PAM sequence: CTT
  source 1..20: mol_type = other DNA
aaatagacagtgactttaag

SEQ ID NO: 12746 - DNA, 20 bp, synthetic construct
  misc_feature 1..20: note = Description of Artificial Sequence: Synthetic oligonucleotide
  misc_feature 1..20: note = Target: ANGPTL3; (-) strand; PAM type: YTN; PAM sequence: TTA
  source 1..20: mol_type = other DNA
atcttaaatagacagtgact

SEQ ID NO: 12747 - DNA, 20 bp, synthetic construct
  misc_feature 1..20: note = Description of Artificial Sequence: Synthetic oligonucleotide
  misc_feature 1..20: note = Target: ANGPTL3; (-) strand; PAM type: YTN; PAM sequence: TTT
  source 1..20: mol_type = other DNA
aatcttaaatagacagtgac

SEQ ID NO: 12748 - DNA, 20 bp, synthetic construct
  misc_feature 1..20: note = Description of Artificial Sequence: Synthetic oligonucleotide
  misc_feature 1..20: note = Target: ANGPTL3; (-) strand; PAM type: YTN; PAM sequence: TTG
  source 1..20: mol_type = other DNA
tatgtttaatcttaaataga

SEQ ID NO: 12749 - DNA, 20 bp, synthetic construct
  misc_feature 1..20: note = Description of Artificial Sequence: Synthetic oligonucleotide
  misc_feature 1..20: note = Target: ANGPTL3; (-) strand; PAM type: YTN; PAM sequence: TTA
  source 1..20: mol_type = other DNA
tgtgattgtatgtttaatct

SEQ ID NO: 12750 - DNA, 20 bp, synthetic construct
  misc_feature 1..20: note = Description of Artificial Sequence: Synthetic oligonucleotide
  misc_feature 1..20: note = Target: ANGPTL3; (-) strand; PAM type: YTN; PAM sequence: TTA
  source 1..20: mol_type = other DNA
aggttatgtgattgtatgtt

SEQ ID NO: 12751 - DNA, 20 bp, synthetic construct
  misc_feature 1..20: note = Description of Artificial Sequence: Synthetic oligonucleotide
  misc_feature 1..20: note = Target: ANGPTL3; (-) strand; PAM type: YTN; PAM sequence: TTT
  source 1..20: mol_type = other DNA
aaggttatgtgattgtatgt

SEQ ID NO: 12752 - DNA, 20 bp, synthetic construct
  misc_feature 1..20: note = Description of Artificial Sequence: Synthetic oligonucleotide
  misc_feature 1..20: note = Target: ANGPTL3; (-) strand; PAM type: YTN; PAM sequence: CTT
  source 1..20: mol_type = other DNA
taaggttatgtgattgtatg

SEQ ID NO: 12753 - DNA, 20 bp, synthetic construct
  misc_feature 1..20: note = Description of Artificial Sequence: Synthetic oligonucleotide
  misc_feature 1..20: note = Target: ANGPTL3; (-) strand; PAM type: YTN; PAM sequence: TTC
  source 1..20: mol_type = other DNA
tttaaggttatgtgattgta

SEQ ID NO: 12754 - DNA, 20 bp, synthetic construct
  misc_feature 1..20: note = Description of Artificial Sequence: Synthetic oligonucleotide
  misc_feature 1..20: note = Target: ANGPTL3; (-) strand; PAM type: YTN; PAM sequence: TTG
  source 1..20: mol_type = other DNA
agaaatgtaaacggtattct

SEQ ID NO: 12755 - DNA, 20 bp, synthetic construct
  misc_feature 1..20: note = Description of Artificial Sequence: Synthetic oligonucleotide
  misc_feature 1..20: note = Target: ANGPTL3; (-) strand; PAM type: YTN; PAM sequence: TTG
  source 1..20: mol_type = other DNA
attgagaaatgtaaacggta

SEQ ID NO: 12756 - DNA, 20 bp, synthetic construct
  misc_feature 1..20: note = Description of Artificial Sequence: Synthetic oligonucleotide
  misc_feature 1..20: note = Target: ANGPTL3; (-) strand; PAM type: YTN; PAM sequence: TTT
  source 1..20: mol_type = other DNA
gattgagaaatgtaaacggt

SEQ ID NO: 12757 - DNA, 20 bp, synthetic construct
  misc_feature 1..20: note = Description of Artificial Sequence: Synthetic oligonucleotide
  misc_feature 1..20: note = Target: ANGPTL3; (-) strand; PAM type: YTN; PAM sequence: TTT
  source 1..20: mol_type = other DNA
tgattgagaaatgtaaacgg

SEQ ID NO: 12758 - DNA, 20 bp, synthetic construct
  misc_feature 1..20: note = Description of Artificial Sequence: Synthetic oligonucleotide
  misc_feature 1..20: note = Target: ANGPTL3; (-) strand; PAM type: YTN; PAM sequence: TTA
  source 1..20: mol_type = other DNA
taagaattttgattgagaaa

SEQ ID NO: 12759 - DNA, 20 bp, synthetic construct
  misc_feature 1..20: note = Description of Artificial Sequence: Synthetic oligonucleotide
  misc_feature 1..20: note = Target: ANGPTL3; (-) strand; PAM type: YTN; PAM sequence: TTA
  source 1..20: mol_type = other DNA
aaacaaatagtattataaga

SEQ ID NO: 12760 - DNA, 20 bp, synthetic construct
  misc_feature 1..20: note = Description of Artificial Sequence: Synthetic oligonucleotide
  misc_feature 1..20: note = Target: ANGPTL3; (-) strand; PAM type: YTN; PAM sequence: TTT
  source 1..20: mol_type = other DNA
aaaacaaatagtattataag

SEQ ID NO: 12761 - DNA, 20 bp, synthetic construct
  misc_feature 1..20: note = Description of Artificial Sequence: Synthetic oligonucleotide
  misc_feature 1..20: note = Target: ANGPTL3; (-) strand; PAM type: YTN; PAM sequence: TTC
  source 1..20: mol_type = other DNA
ccacatcacaaaatttaaaa

SEQ ID NO: 12762 - DNA, 20 bp, synthetic construct
  misc_feature 1..20: note = Description of Artificial Sequence: Synthetic oligonucleotide
  misc_feature 1..20: note = Target: ANGPTL3; (-) strand; PAM type: YTN; PAM sequence: TTG
  source 1..20: mol_type = other DNA
attcccacatcacaaaattt

SEQ ID NO: 12763 - DNA, 20 bp, synthetic construct
  misc_feature 1..20: note = Description of Artificial Sequence: Synthetic oligonucleotide
  misc_feature 1..20: note = Target: ANGPTL3; (-) strand; PAM type: YTN; PAM sequence: CTA
  source 1..20: mol_type = other DNA
aaattgattcccacatcaca

SEQ ID NO: 12764 - DNA, 20 bp, synthetic construct
  misc_feature 1..20: note = Description of Artificial Sequence: Synthetic oligonucleotide
  misc_feature 1..20: note = Target: ANGPTL3; (-) strand; PAM type: YTN; PAM sequence: TTG
  source 1..20: mol_type = other DNA
tgaccatctaaaattgattc

SEQ ID NO: 12765 - DNA, 20 bp, synthetic construct
  misc_feature 1..20: note = Description of Artificial Sequence: Synthetic oligonucleotide
  misc_feature 1..20: note = Target: ANGPTL3; (-) strand; PAM type: YTN; PAM sequence: CTA
  source 1..20: mol_type = other DNA
gattgtgaccatctaaaatt

SEQ ID NO: 12766 - DNA, 20 bp, synthetic construct
  misc_feature 1..20: note = Description of Artificial Sequence: Synthetic oligonucleotide
  misc_feature 1..20: note = Target: ANGPTL3; (-) strand; PAM type: YTN; PAM sequence: TTA
  source 1..20: mol_type = other DNA
taatctagattgtgaccatc

SEQ ID NO: 12767 - DNA, 20 bp, synthetic construct
  misc_feature 1..20: note = Description of Artificial Sequence: Synthetic oligonucleotide
  misc_feature 1..20: note = Target: ANGPTL3; (-) strand; PAM type: YTN; PAM sequence: TTG
  source 1..20: mol_type = other DNA
attataatctagattgtgac

SEQ ID NO: 12768 - DNA, 20 bp, synthetic construct
  misc_feature 1..20: note = Description of Artificial Sequence: Synthetic oligonucleotide
  misc_feature 1..20: note = Target: ANGPTL3; (-) strand; PAM type: YTN; PAM sequence: CTA
  source 1..20: mol_type = other DNA
ttgattataatctagattgt

SEQ ID NO: 12769 - DNA, 20 bp, synthetic construct
  misc_feature 1..20: note = Description of Artificial Sequence: Synthetic oligonucleotide
  misc_feature 1..20: note = Target: ANGPTL3; (-) strand; PAM type: YTN; PAM sequence: TTC
  source 1..20: mol_type = other DNA
acctattgattataatctag

SEQ ID NO: 12770 - DNA, 20 bp, synthetic construct
  misc_feature 1..20: note = Description of Artificial Sequence: Synthetic oligonucleotide
  misc_feature 1..20: note = Target: ANGPTL3; (-) strand; PAM type: YTN; PAM sequence: TTA
  source 1..20: mol_type = other DNA
ataagttcacctattgatta

SEQ ID NO: 12771 - DNA, 20 bp, synthetic construct
  misc_feature 1..20: note = Description of Artificial Sequence: Synthetic oligonucleotide
  misc_feature 1..20: note = Target: ANGPTL3; (-) strand; PAM type: YTN; PAM sequence: TTT
  source 1..20: mol_type = other DNA
aataagttcacctattgatt

SEQ ID NO: 12772 - DNA, 20 bp, synthetic construct
  misc_feature 1..20: note = Description of Artificial Sequence: Synthetic oligonucleotide
  misc_feature 1..20: note = Target: ANGPTL3; (-) strand; PAM type: YTN; PAM sequence: TTA
  source 1..20: mol_type = other DNA
tttaataagttcacctattg

SEQ ID NO: 12773 - DNA, 20 bp, synthetic construct
  misc_feature 1..20: note = Description of Artificial Sequence: Synthetic oligonucleotide
  misc_feature 1..20: note = Target: ANGPTL3; (-) strand; PAM type: YTN; PAM sequence: TTA
  source 1..20: mol_type = other DNA
gaaaagttatttaataagtt

SEQ ID NO: 12774 - DNA, 20 bp, synthetic construct
  misc_feature 1..20: note = Description of Artificial Sequence: Synthetic oligonucleotide
  misc_feature 1..20: note = Target: ANGPTL3; (-) strand; PAM type: YTN; PAM sequence: TTT
  source 1..20: mol_type = other DNA
agaaaagttatttaataagt

SEQ ID NO: 12775 - DNA, 20 bp, synthetic construct
  misc_feature 1..20: note = Description of Artificial Sequence: Synthetic oligonucleotide
  misc_feature 1..20: note = Target: ANGPTL3; (-) strand; PAM type: YTN; PAM sequence: TTA
  source 1..20: mol_type = other DNA
tttagaaaagttatttaata

SEQ ID NO: 12776 - DNA, 20 bp, synthetic construct
  misc_feature 1..20: note = Description of Artificial Sequence: Synthetic oligonucleotide
  misc_feature 1..20: note = Target: ANGPTL3; (-) strand; PAM type: YTN; PAM sequence: TTT
  source 1..20: mol_type = other DNA
atttagaaaagttatttaat

SEQ ID NO: 12777 - DNA, 20 bp, synthetic construct
  misc_feature 1..20: note = Description of Artificial Sequence: Synthetic oligonucleotide
  misc_feature 1..20: note = Target: ANGPTL3; (-) strand; PAM type: YTN; PAM sequence: TTT
  source 1..20: mol_type = other DNA
tatttagaaaagttatttaa

SEQ ID NO: 12778 - DNA, 20 bp, synthetic construct
  misc_feature 1..20: note = Description of Artificial Sequence: Synthetic oligonucleotide
  misc_feature 1..20: note = Target: ANGPTL3; (-) strand; PAM type: YTN; PAM sequence: TTT
  source 1..20: mol_type = other DNA
ttatttagaaaagttattta

SEQ ID NO: 12779 - DNA, 20 bp, synthetic construct
  misc_feature 1..20: note = Description of Artificial Sequence: Synthetic oligonucleotide
  misc_feature 1..20: note = Target: ANGPTL3; (-) strand; PAM type: YTN; PAM sequence: TTT
  source 1..20: mol_type = other DNA
tttatttagaaaagttattt

SEQ ID NO: 12780 - DNA, 20 bp, synthetic construct
  misc_feature 1..20: note = Description of Artificial Sequence: Synthetic oligonucleotide
  misc_feature 1..20: note = Target: ANGPTL3; (-) strand; PAM type: YTN; PAM sequence: CTA
  source 1..20: mol_type = other DNA
aattttttatttagaaaagt

SEQ ID NO: 12781 - DNA, 20 bp, synthetic construct
  misc_feature 1..20: note = Description of Artificial Sequence: Synthetic oligonucleotide
  misc_feature 1..20: note = Target: ANGPTL3; (-) strand; PAM type: YTN; PAM sequence: CTC
  source 1..20: mol_type = other DNA
taaattttttatttagaaaa

SEQ ID NO: 12782 - DNA, 20 bp, synthetic construct
  misc_feature 1..20: note = Description of Artificial Sequence: Synthetic oligonucleotide
  misc_feature 1..20: note = Target: ANGPTL3; (-) strand; PAM type: YTN; PAM sequence: TTA
  source 1..20: mol_type = other DNA
aaataaaagtctctaaattt

SEQ ID NO: 12783 - DNA, 20 bp, synthetic construct
  misc_feature 1..20: note = Description of Artificial Sequence: Synthetic oligonucleotide
  misc_feature 1..20: note = Target: ANGPTL3; (-) strand; PAM type: YTN; PAM sequence: TTT
  source 1..20: mol_type = other DNA
aaaataaaagtctctaaatt

SEQ ID NO: 12784 - DNA, 20 bp, synthetic construct
  misc_feature 1..20: note = Description of Artificial Sequence: Synthetic oligonucleotide
  misc_feature 1..20: note = Target: ANGPTL3; (-) strand; PAM type: YTN; PAM sequence: TTT
  source 1..20: mol_type = other DNA
taaaataaaagtctctaaat

SEQ ID NO: 12785 - DNA, 20 bp, synthetic construct
  misc_feature 1..20: note = Description of Artificial Sequence: Synthetic oligonucleotide
  misc_feature 1..20: note = Target: ANGPTL3; (-) strand; PAM type: YTN; PAM sequence: CTT
  source 1..20: mol_type = other DNA
ttaaaataaaagtctctaaa

SEQ ID NO: 12786 - DNA, 20 bp, synthetic construct
  misc_feature 1..20: note = Description of Artificial Sequence: Synthetic oligonucleotide
  misc_feature 1..20: note = Target: ANGPTL3; (-) strand; PAM type: YTN; PAM sequence: CTC
  source 1..20: mol_type = other DNA
atatgatgccttttaaaata

SEQ ID NO: 12787 - DNA, 20 bp, synthetic construct
  misc_feature 1..20: note = Description of Artificial Sequence: Synthetic oligonucleotide
  misc_feature 1..20: note = Target: ANGPTL3; (-) strand; PAM type: YTN; PAM sequence: TTA
  source 1..20: mol_type = other DNA
gctcatatgatgccttttaa

SEQ ID NO: 12788 - DNA, 20 bp, synthetic construct
  misc_feature 1..20: note = Description of Artificial Sequence: Synthetic oligonucleotide
  misc_feature 1..20: note = Target: ANGPTL3; (-) strand; PAM type: YTN; PAM sequence: TTG
  source 1..20: mol_type = other DNA
tgatattagctcatatgatg

SEQ ID NO: 12789 - DNA, 20 bp, synthetic construct
  misc_feature 1..20: note = Description of Artificial Sequence: Synthetic oligonucleotide
  misc_feature 1..20: note = Target: ANGPTL3; (-) strand; PAM type: YTN; PAM sequence: CTG
  source 1..20: mol_type = other DNA
ggaaagttgtgatattagct

SEQ ID NO: 12790 - DNA, 20 bp, synthetic construct
  misc_feature 1..20: note = Description of Artificial Sequence: Synthetic oligonucleotide
  misc_feature 1..20: note = Target: ANGPTL3; (-) strand; PAM type: YTN; PAM sequence: TTA
  source 1..20: mol_type = other DNA
aactgggaaagttgtgatat

SEQ ID NO: 12791 - DNA, 20 bp, synthetic construct
  misc_feature 1..20: note = Description of Artificial Sequence: Synthetic oligonucleotide
  misc_feature 1..20: note = Target: ANGPTL3; (-) strand; PAM type: YTN; PAM sequence: TTT
  source 1..20: mol_type = other DNA
aaactgggaaagttgtgata

SEQ ID NO: 12792 - DNA, 20 bp, synthetic construct
  misc_feature 1..20: note = Description of Artificial Sequence: Synthetic oligonucleotide
  misc_feature 1..20: note = Target: ANGPTL3; (-) strand; PAM type: YTN; PAM sequence: TTT
  source 1..20: mol_type = other DNA
taaactgggaaagttgtgat

SEQ ID NO: 12793 - DNA, 20 bp, synthetic construct
  misc_feature 1..20: note = Description of Artificial Sequence: Synthetic oligonucleotide
  misc_feature 1..20: note = Target: ANGPTL3; (-) strand; PAM type: YTN; PAM sequence: TTT
  source 1..20: mol_type = other DNA
ttaaactgggaaagttgtga

SEQ ID NO: 12794 - DNA, 20 bp, synthetic construct
  misc_feature 1..20: note = Description of Artificial Sequence: Synthetic oligonucleotide
  misc_feature 1..20: note = Target: ANGPTL3; (-) strand; PAM type: YTN; PAM sequence: TTT
  source 1..20: mol_type = other DNA
tttaaactgggaaagttgtg

SEQ ID NO: 12795 - DNA, 20 bp, synthetic construct
  misc_feature 1..20: note = Description of Artificial Sequence: Synthetic oligonucleotide
  misc_feature 1..20: note = Target: ANGPTL3; (-) strand; PAM type: YTN; PAM sequence: CTA
  source 1..20: mol_type = other DNA
gttttttaaactgggaaagt

SEQ ID NO: 12796 - DNA, 20 bp, synthetic construct
  misc_feature 1..20: note = Description of Artificial Sequence: Synthetic oligonucleotide
  misc_feature 1..20: note = Target: ANGPTL3; (-) strand; PAM type: YTN; PAM sequence: TTA
  source 1..20: mol_type = other DNA
acaagagtactagtttttta

SEQ ID NO: 12797 - DNA, 20 bp, synthetic construct
  misc_feature 1..20: note = Description of Artificial Sequence: Synthetic oligonucleotide
  misc_feature 1..20: note = Target: ANGPTL3; (-) strand; PAM type: YTN; PAM sequence: TTT
  source 1..20: mol_type = other DNA
aacaagagtactagtttttt

SEQ ID NO: 12798 - DNA, 20 bp, synthetic construct
  misc_feature 1..20: note = Description of Artificial Sequence: Synthetic oligonucleotide
  misc_feature 1..20: note = Target: ANGPTL3; (-) strand; PAM type: YTN; PAM sequence: TTT
  source 1..20: mol_type = other DNA
taacaagagtactagttttt

SEQ ID NO: 12799 - DNA, 20 bp, synthetic construct
  misc_feature 1..20: note = Description of Artificial Sequence: Synthetic oligonucleotide
  misc_feature 1..20: note = Target: ANGPTL3; (-) strand; PAM type: YTN; PAM sequence: TTA
  source 1..20: mol_type = other DNA
gagttttaacaagagtacta

SEQ ID NO: 12800 - DNA, 20 bp, synthetic construct
  misc_feature 1..20: note = Description of Artificial Sequence: Synthetic oligonucleotide
  misc_feature 1..20: note = Target: ANGPTL3; (-) strand; PAM type: YTN; PAM sequence: TTT
  source 1..20: mol_type = other DNA
agagttttaacaagagtact

SEQ ID NO: 12801 - DNA, 20 bp, synthetic construct
  misc_feature 1..20: note = Description of Artificial Sequence: Synthetic oligonucleotide
  misc_feature 1..20: note = Target: ANGPTL3; (-) strand; PAM type: YTN; PAM sequence: TTA
  source 1..20: mol_type = other DNA
gtcaagtttagagttttaac

SEQ ID NO: 12802 - DNA, 20 bp, synthetic construct
  misc_feature 1..20: note = Description of Artificial Sequence: Synthetic oligonucleotide
  misc_feature 1..20: note = Target: ANGPTL3; (-) strand; PAM type: YTN; PAM sequence: TTT
  source 1..20: mol_type = other DNA
agtcaagtttagagttttaa

SEQ ID NO: 12803 - DNA, 20 bp, synthetic construct
  misc_feature 1..20: note = Description of Artificial Sequence: Synthetic oligonucleotide
  misc_feature 1..20: note = Target: ANGPTL3; (-) strand; PAM type: YTN; PAM sequence: CTG
  source 1..20: mol_type = other DNA
tatttagtcaagtttagagt

SEQ ID NO: 12804 - DNA, 20 bp, synthetic construct
  misc_feature 1..20: note = Description of Artificial Sequence: Synthetic oligonucleotide
  misc_feature 1..20: note = Target: ANGPTL3; (-) strand; PAM type: YTN; PAM sequence: CTC
  source 1..20: mol_type = other DNA
tgtatttagtcaagtttaga

SEQ ID NO: 12805 - DNA, 20 bp, synthetic construct
  misc_feature 1..20: note = Description of Artificial Sequence: Synthetic oligonucleotide
  misc_feature 1..20: note = Target: ANGPTL3; (-) strand; PAM type: YTN; PAM sequence: TTA
  source 1..20: mol_type = other DNA
ccagtcctctgtatttagtc

SEQ ID NO: 12806 - DNA, 20 bp, synthetic construct
  misc_feature 1..20: note = Description of Artificial Sequence: Synthetic oligonucleotide
  misc_feature 1..20: note = Target: ANGPTL3; (-) strand; PAM type: YTN; PAM sequence: CTG
  source 1..20: mol_type = other DNA
tacaattaccagtcctctgt

SEQ ID NO: 12807 - DNA, 20 bp, synthetic construct
  misc_feature 1..20: note = Description of Artificial Sequence: Synthetic oligonucleotide
  misc_feature 1..20: note = Target: ANGPTL3; (-) strand; PAM type: YTN; PAM sequence: TTA
  source 1..20: mol_type = other DNA
agaactgtacaattaccagt

SEQ ID NO: 12808 - DNA, 20 bp, synthetic construct
  misc_feature 1..20: note = Description of Artificial Sequence: Synthetic oligonucleotide
  misc_feature 1..20: note = Target: ANGPTL3; (-) strand; PAM type: YTN; PAM sequence: TTT
  source 1..20: mol_type = other DNA
aagaactgtacaattaccag

SEQ ID NO: 12809 - DNA, 20 bp, synthetic construct
  misc_feature 1..20: note = Description of Artificial Sequence: Synthetic oligonucleotide
  misc_feature 1..20: note = Target: ANGPTL3; (-) strand; PAM type: YTN; PAM sequence: CTA
  source 1..20: mol_type = other DNA
caacatttaagaactgtaca

SEQ ID NO: 12810 - DNA, 20 bp, synthetic construct
  misc_feature 1..20: note = Description of Artificial Sequence: Synthetic oligonucleotide
  misc_feature 1..20: note = Target: ANGPTL3; (-) strand; PAM type: YTN; PAM sequence: TTA
  source 1..20: mol_type = other DNA
atactacaacatttaagaac

SEQ ID NO: 12811 - DNA, 20 bp, synthetic construct
  misc_feature 1..20: note = Description of Artificial Sequence: Synthetic oligonucleotide
  misc_feature 1..20: note = Target: ANGPTL3; (-) strand; PAM type: YTN; PAM sequence: TTG
  source 1..20: mol_type = other DNA
aaattaatactacaacattt

SEQ ID NO: 12812 - DNA, 20 bp, synthetic construct
  misc_feature 1..20: note = Description of Artificial Sequence: Synthetic oligonucleotide
  misc_feature 1..20: note = Target: ANGPTL3; (-) strand; PAM type: YTN; PAM sequence: TTT
  source 1..20: mol_type = other DNA
gaaattaatactacaacatt

SEQ ID NO: 12813 - DNA, 20 bp, synthetic construct
  misc_feature 1..20: note = Description of Artificial Sequence: Synthetic oligonucleotide
  misc_feature 1..20: note = Target: ANGPTL3; (-) strand; PAM type: YTN; PAM sequence: TTT
  source 1..20: mol_type = other DNA
tgaaattaatactacaacat

SEQ ID NO: 12814 - DNA, 20 bp, synthetic construct
  misc_feature 1..20: note = Description of Artificial Sequence: Synthetic oligonucleotide
  misc_feature 1..20: note = Target: ANGPTL3; (-) strand; PAM type: YTN; PAM sequence: TTA
  source 1..20: mol_type = other DNA
gttttgaaattaatactaca

SEQ ID NO: 12815 - DNA, 20 bp, synthetic construct
  misc_feature 1..20: note = Description of Artificial Sequence: Synthetic oligonucleotide
  misc_feature 1..20: note = Target: ANGPTL3; (-) strand; PAM type: YTN; PAM sequence: TTT
  source 1..20: mol_type = other DNA
agttttgaaattaatactac

SEQ ID NO: 12816 - DNA, 20 bp, synthetic construct
  misc_feature 1..20: note = Description of Artificial Sequence: Synthetic oligonucleotide
  misc_feature 1..20: note = Target: ANGPTL3; (-) strand; PAM type: YTN; PAM sequence: TTT
  source 1..20: mol_type = other DNA
tagttttgaaattaatacta

SEQ ID NO: 12817 - DNA, 20 bp, synthetic construct
  misc_feature 1..20: note = Description of Artificial Sequence: Synthetic oligonucleotide
  misc_feature 1..20: note = Target: ANGPTL3; (-) strand; PAM type: YTN; PAM sequence: TTT
  source 1..20: mol_type = other DNA
ttagttttgaaattaatact

SEQ ID NO: 12818 - DNA, 20 bp, synthetic construct
  misc_feature 1..20: note = Description of Artificial Sequence: Synthetic oligonucleotide
  misc_feature 1..20: note = Target: ANGPTL3; (-) strand; PAM type: YTN; PAM sequence: CTG
  source 1..20: mol_type = other DNA
acgatttttagttttgaaat

SEQ ID NO: 12819 - DNA, 20 bp, synthetic construct
  misc_feature 1..20: note = Description of Artificial Sequence: Synthetic oligonucleotide
  misc_feature 1..20: note = Target: ANGPTL3; (-) strand; PAM type: YTN; PAM sequence: CTG
  source 1..20: mol_type = other DNA
tgctgacgatttttagtttt

SEQ ID NO: 12820 - DNA, 20 bp, synthetic construct
  misc_feature 1..20: note = Description of Artificial Sequence: Synthetic oligonucleotide
  misc_feature 1..20: note = Target: ANGPTL3; (-) strand; PAM type: YTN; PAM sequence: CTC
  source 1..20: mol_type = other DNA
tgtgctgacgatttttagtt

SEQ ID NO: 12821 - DNA, 20 bp, synthetic construct
  misc_feature 1..20: note = Description of Artificial Sequence: Synthetic oligonucleotide
  misc_feature 1..20: note = Target: ANGPTL3; (-) strand; PAM type: YTN; PAM sequence: TTA
  source 1..20: mol_type = other DNA
cacatactctgtgctgacga

SEQ ID NO: 12822 - DNA, 20 bp, synthetic construct
  misc_feature 1..20: note = Description of Artificial Sequence: Synthetic oligonucleotide
  misc_feature 1..20: note = Target: ANGPTL3; (-) strand; PAM type: YTN; PAM sequence: TTT
  source 1..20: mol_type = other DNA
acacatactctgtgctgacg

SEQ ID NO: 12823 - DNA, 20 bp, synthetic construct
  misc_feature 1..20: note = Description of Artificial Sequence: Synthetic oligonucleotide
  misc_feature 1..20: note = Target: ANGPTL3; (-) strand; PAM type: YTN; PAM sequence: TTT
  source 1..20: mol_type = other DNA
tacacatactctgtgctgac

SEQ ID NO: 12824 - DNA, 20 bp, synthetic construct
  misc_feature 1..20: note = Description of Artificial Sequence: Synthetic oligonucleotide
  misc_feature 1..20: note = Target: ANGPTL3; (-) strand; PAM type: YTN; PAM sequence: TTT
  source 1..20: mol_type = other DNA
ttacacatactctgtgctga

SEQ ID NO: 12825 - DNA, 20 bp, synthetic construct
  misc_feature 1..20: note = Description of Artificial Sequence: Synthetic oligonucleotide
  misc_feature 1..20: note = Target: ANGPTL3; (-) strand; PAM type: YTN; PAM sequence: TTA
  source 1..20: mol_type = other DNA
cagatttttacacatactct

SEQ ID NO: 12826 - DNA, 20 bp, synthetic construct
  misc_feature 1..20: note = Description of Artificial Sequence: Synthetic oligonucleotide
  misc_feature 1..20: note = Target: ANGPTL3; (-) strand; PAM type: YTN; PAM sequence: TTG
  source 1..20: mol_type = other DNA
tattacagatttttacacat

SEQ ID NO: 12827 - DNA, 20 bp, synthetic construct
  misc_feature 1..20: note = Description of Artificial Sequence: Synthetic oligonucleotide
  misc_feature 1..20: note = Target: ANGPTL3; (-) strand; PAM type: YTN; PAM sequence: TTT
  source 1..20: mol_type = other DNA
gtattacagatttttacaca

SEQ ID NO: 12828 - DNA, 20 bp, synthetic construct
  misc_feature 1..20: note = Description of Artificial Sequence: Synthetic oligonucleotide
  misc_feature 1..20: note = Target: ANGPTL3; (-) strand; PAM type: YTN; PAM sequence: TTA
  source 1..20: mol_type = other DNA
aaaatttgtattacagattt

SEQ ID NO: 12829 - DNA, 20 bp, synthetic construct
  misc_feature 1..20: note = Description of Artificial Sequence: Synthetic oligonucleotide
  misc_feature 1..20: note = Target: ANGPTL3; (-) strand; PAM type: YTN; PAM sequence: TTT
  source 1..20: mol_type = other DNA
aaaaatttgtattacagatt

SEQ ID NO: 12830 - DNA, 20 bp, synthetic construct
  misc_feature 1..20: note = Description of Artificial Sequence: Synthetic oligonucleotide
  misc_feature 1..20: note = Target: ANGPTL3; (-) strand; PAM type: YTN; PAM sequence: TTG
  source 1..20: mol_type = other DNA
tagcaaaatgaagcatcagt

SEQ ID NO: 12831 - DNA, 20 bp, synthetic construct
  misc_feature 1..20: note = Description of Artificial Sequence: Synthetic oligonucleotide
  misc_feature 1..20: note = Target: ANGPTL3; (-) strand; PAM type: YTN; PAM sequence: TTT
  source 1..20: mol_type = other DNA
gtagcaaaatgaagcatcag

SEQ ID NO: 12832 - DNA, 20 bp, synthetic construct
  misc_feature 1..20: note = Description of Artificial Sequence: Synthetic oligonucleotide
  misc_feature 1..20: note = Target: ANGPTL3; (-) strand; PAM type: YTN; PAM sequence: TTT
  source 1..20: mol_type = other DNA
tgtagcaaaatgaagcatca

SEQ ID NO: 12833 - DNA, 20 bp, synthetic construct
  misc_feature 1..20: note = Description of Artificial Sequence: Synthetic oligonucleotide
  misc_feature 1..20: note = Target: ANGPTL3; (-) strand; PAM type: YTN; PAM sequence: TTA
  source 1..20: mol_type = other DNA
ttttgtagcaaaatgaagca

SEQ ID NO: 12834 - DNA, 20 bp, synthetic construct
  misc_feature 1..20: note = Description of Artificial Sequence: Synthetic oligonucleotide
  misc_feature 1..20: note = Target: ANGPTL3; (-) strand; PAM type: YTN; PAM sequence: CTC
  source 1..20: mol_type = other DNA
caaattattttgtagcaaaa

SEQ ID NO: 12835 - DNA, 20 bp, synthetic construct
  misc_feature 1..20: note = Description of Artificial Sequence: Synthetic oligonucleotide
  misc_feature 1..20: note = Target: ANGPTL3; (-) strand; PAM type: YTN; PAM sequence: TTA
  source 1..20: mol_type = other DNA
ctccaaattattttgtagca

SEQ ID NO: 12836 - DNA, 20 bp, synthetic construct
  misc_feature 1..20: note = Description of Artificial Sequence: Synthetic oligonucleotide
  misc_feature 1..20: note = Target: ANGPTL3; (-) strand; PAM type: YTN; PAM sequence: TTT
  source 1..20: mol_type = other DNA
actccaaattattttgtagc

SEQ ID NO: 12837 - DNA, 20 bp, synthetic construct
  misc_feature 1..20: note = Description of Artificial Sequence: Synthetic oligonucleotide
  misc_feature 1..20: note = Target: ANGPTL3; (-) strand; PAM type: YTN; PAM sequence: TTC
  source 1..20: mol_type = other DNA
ataaataaatcatatcaaac

SEQ ID NO: 12838 - DNA, 20 bp, synthetic construct
  misc_feature 1..20: note = Description of Artificial Sequence: Synthetic oligonucleotide
  misc_feature 1..20: note = Target: ANGPTL3; (-) strand; PAM type: YTN; PAM sequence: TTT
  source 1..20: mol_type = other DNA
cataaataaatcatatcaaa

SEQ ID NO: 12839 - DNA, 20 bp, synthetic construct
  misc_feature 1..20: note = Description of Artificial Sequence: Synthetic oligonucleotide
  misc_feature 1..20: note = Target: ANGPTL3; (-) strand; PAM type: YTN; PAM sequence: TTA
  source 1..20: mol_type = other DNA
ggtttcataaataaatcata

SEQ ID NO: 12840 - DNA, 20 bp, synthetic construct
  misc_feature 1..20: note = Description of Artificial Sequence: Synthetic oligonucleotide
  misc_feature 1..20: note = Target: ANGPTL3; (-) strand; PAM type: YTN; PAM sequence: TTC
  source 1..20: mol_type = other DNA
attaggtttcataaataaat

SEQ ID NO: 12841 - DNA, 20 bp, synthetic construct
  misc_feature 1..20: note = Description of Artificial Sequence: Synthetic oligonucleotide
  misc_feature 1..20: note = Target: ANGPTL3; (-) strand; PAM type: YTN; PAM sequence: CTT
  source 1..20: mol_type = other DNA
cattaggtttcataaataaa

SEQ ID NO: 12842 - DNA, 20 bp, synthetic construct
  misc_feature 1..20: note = Description of Artificial Sequence: Synthetic oligonucleotide
  misc_feature 1..20: note = Target: ANGPTL3; (-) strand; PAM type: YTN; PAM sequence: CTG
  source 1..20: mol_type = other DNA
cttcattaggtttcataaat

SEQ ID NO: 12843 - DNA, 20 bp, synthetic construct
  misc_feature 1..20: note = Description of Artificial Sequence: Synthetic oligonucleotide
  misc_feature 1..20: note = Target: ANGPTL3; (-) strand; PAM type: YTN; PAM sequence: TTC
  source 1..20: mol_type = other DNA
tgcttcattaggtttcataa

SEQ ID NO: 12844 - DNA, 20 bp, synthetic construct
  misc_feature 1..20: note = Description of Artificial Sequence: Synthetic oligonucleotide
  misc_feature 1..20: note = Target: ANGPTL3; (-) strand; PAM type: YTN; PAM sequence: TTA
  source 1..20: mol_type = other DNA
attctgcttcattaggtttc

SEQ ID NO: 12845 - DNA, 20 bp, synthetic construct
  misc_feature 1..20: note = Description of Artificial Sequence: Synthetic oligonucleotide
  misc_feature 1..20: note = Target: ANGPTL3; (-) strand; PAM type: YTN; PAM sequence: TTT
  source 1..20: mol_type = other DNA
aattctgcttcattaggttt

SEQ ID NO: 12846 - DNA, 20 bp, synthetic construct
  misc_feature 1..20: note = Description of Artificial Sequence: Synthetic oligonucleotide
  misc_feature 1..20: note = Target: ANGPTL3; (-) strand; PAM type: YTN; PAM sequence: TTA
  source 1..20: mol_type = other DNA
atacagtatttaattctgct

SEQ ID NO: 12847 - DNA, 20 bp, synthetic construct
  misc_feature 1..20: note = Description of Artificial Sequence: Synthetic oligonucleotide
  misc_feature 1..20: note = Target: ANGPTL3; (-) strand; PAM type: YTN; PAM sequence: TTT
  source 1..20: mol_type = other DNA
aatacagtatttaattctgc

SEQ ID NO: 12848 - DNA, 20 bp, synthetic construct
  misc_feature 1..20: note = Description of Artificial Sequence: Synthetic oligonucleotide
  misc_feature 1..20: note = Target: ANGPTL3; (-) strand; PAM type: YTN; PAM sequence: TTT
  source 1..20: mol_type = other DNA
taatacagtatttaattctg

SEQ ID NO: 12849 - DNA, 20 bp, synthetic construct
  misc_feature 1..20: note = Description of Artificial Sequence: Synthetic oligonucleotide
  misc_feature 1..20: note = Target: ANGPTL3; (-) strand; PAM type: YTN; PAM sequence: TTA
  source 1..20: mol_type = other DNA
ttttaatacagtatttaatt

SEQ ID NO: 12850 - DNA, 20 bp, synthetic construct
  misc_feature 1..20: note = Description of Artificial Sequence: Synthetic oligonucleotide
  misc_feature 1..20: note = Target: ANGPTL3; (-) strand; PAM type: YTN; PAM sequence: CTT
  source 1..20: mol_type = other DNA
attttaatacagtatttaat

SEQ ID NO: 12851 - DNA, 20 bp, synthetic construct
  misc_feature 1..20: note = Description of Artificial Sequence: Synthetic oligonucleotide
  misc_feature 1..20: note = Target: ANGPTL3; (-) strand; PAM type: YTN; PAM sequence: TTA
  source 1..20: mol_type = other DNA
aagacagcgaacttatttta

SEQ ID NO: 12852 - DNA, 20 bp, synthetic construct
  misc_feature 1..20: note = Description of Artificial Sequence: Synthetic oligonucleotide
  misc_feature 1..20: note = Target: ANGPTL3; (-) strand; PAM type: YTN; PAM sequence: TTT
  source 1..20: mol_type = other DNA
aaagacagcgaacttatttt

SEQ ID NO: 12853 - DNA, 20 bp, synthetic construct
  misc_feature 1..20: note = Description of Artificial Sequence: Synthetic oligonucleotide
  misc_feature 1..20: note = Target: ANGPTL3; (-) strand; PAM type: YTN; PAM sequence: TTG
  source 1..20: mol_type = other DNA
tttaaagacagcgaacttat

SEQ ID NO: 12854 - DNA, 20 bp, synthetic construct
  misc_feature 1..20: note = Description of Artificial Sequence: Synthetic oligonucleotide
  misc_feature 1..20: note = Target: ANGPTL3; (-) strand; PAM type: YTN; PAM sequence: TTT
  source 1..20: mol_type = other DNA
gtttaaagacagcgaactta

SEQ ID NO: 12855 - DNA, 20 bp, synthetic construct
  misc_feature 1..20: note = Description of Artificial Sequence: Synthetic oligonucleotide
  misc_feature 1..20: note = Target: ANGPTL3; (-) strand; PAM type: YTN; PAM sequence: CTC
  source 1..20: mol_type = other DNA
catttgtttaaagacagcga

SEQ ID NO: 12856 - DNA, 20 bp, synthetic construct
  misc_feature 1..20: note = Description of Artificial Sequence: Synthetic oligonucleotide
  misc_feature 1..20: note = Target: ANGPTL3; (-) strand; PAM type: YTN; PAM sequence: TTA
  source 1..20: mol_type = other DNA
gtagtcatctccatttgttt

SEQ ID NO: 12857 - DNA, 20 bp, synthetic construct
  misc_feature 1..20: note = Description of Artificial Sequence: Synthetic oligonucleotide
  misc_feature 1..20: note = Target: ANGPTL3; (-) strand; PAM type: YTN; PAM sequence: CTT
  source 1..20: mol_type = other DNA
agtagtcatctccatttgtt

SEQ ID NO: 12858 - DNA, 20 bp, synthetic construct
  misc_feature 1..20: note = Description of Artificial Sequence: Synthetic oligonucleotide
  misc_feature 1..20: note = Target: ANGPTL3; (-) strand; PAM type: YTN; PAM sequence: TTA
  source 1..20: mol_type = other DNA
aagtcaatgtgacttagtag

SEQ ID NO: 12859 - DNA, 20 bp, synthetic construct
  misc_feature 1..20: note = Description of Artificial Sequence: Synthetic oligonucleotide
  misc_feature 1..20: note = Target: ANGPTL3; (-) strand; PAM type: YTN; PAM sequence: CTC
  source 1..20: mol_type = other DNA
atgttaaagtcaatgtgact

SEQ ID NO: 12860 - DNA, 20 bp, synthetic construct
  misc_feature 1..20: note = Description of Artificial Sequence: Synthetic oligonucleotide
  misc_feature 1..20: note = Target: ANGPTL3; (-) strand; PAM type: YTN; PAM sequence: TTA
  source 1..20: mol_type = other DNA
acaaataaggtatagtgata

SEQ ID NO: 12861 - DNA, 20 bp, synthetic construct
  misc_feature 1..20: note = Description of Artificial Sequence: Synthetic oligonucleotide
  misc_feature 1..20: note = Target: ANGPTL3; (-) strand; PAM type: YTN; PAM sequence: TTT
  source 1..20: mol_type = other DNA
aacaaataaggtatagtgat

SEQ ID NO: 12862 - DNA, 20 bp, synthetic construct
  misc_feature 1..20: note = Description of Artificial Sequence: Synthetic oligonucleotide
  misc_feature 1..20: note = Target: ANGPTL3; (-) strand; PAM type: YTN; PAM sequence: TTT
  source 1..20: mol_type = other DNA
taacaaataaggtatagtga

SEQ ID NO: 12863 - DNA, 20 bp, synthetic construct
  misc_feature 1..20: note = Description of Artificial Sequence: Synthetic oligonucleotide
  misc_feature 1..20: note = Target: ANGPTL3; (-) strand; PAM type: YTN; PAM sequence: TTA
  source 1..20: mol_type = other DNA
aaatatataaaatgtataca

SEQ ID NO: 12864 - DNA, 20 bp, synthetic construct
  misc_feature 1..20: note = Description of Artificial Sequence: Synthetic oligonucleotide
  misc_feature 1..20: note = Target: ANGPTL3; (-) strand; PAM type: YTN; PAM sequence: TTA
  source 1..20: mol_type = other DNA
agtgttaaaatatataaaat

SEQ ID NO: 12865 - DNA, 20 bp, synthetic construct
  misc_feature 1..20: note = Description of Artificial Sequence: Synthetic oligonucleotide
  misc_feature 1..20: note = Target: ANGPTL3; (-) strand; PAM type: YTN; PAM sequence: TTC
  source 1..20: mol_type = other DNA
atagtattaagtgttaaaat

SEQ ID NO: 12866 - DNA, 20 bp, synthetic construct
  misc_feature 1..20: note = Description of Artificial Sequence: Synthetic oligonucleotide
  misc_feature 1..20: note = Target: ANGPTL3; (-) strand; PAM type: YTN; PAM sequence: TTT
  source 1..20: mol_type = other DNA
catagtattaagtgttaaaa

SEQ ID NO: 12867 - DNA, 20 bp, synthetic construct
  misc_feature 1..20: note = Description of Artificial Sequence: Synthetic oligonucleotide
  misc_feature 1..20: note = Target: ANGPTL3; (-) strand; PAM type: YTN; PAM sequence: TTT
  source 1..20: mol_type = other DNA
tcatagtattaagtgttaaa

SEQ ID NO: 12868 - DNA, 20 bp, synthetic construct
  misc_feature 1..20: note = Description of Artificial Sequence: Synthetic oligonucleotide
  misc_feature 1..20: note = Target: ANGPTL3; (-) strand; PAM type: YTN; PAM sequence: TTG
  source 1..20: mol_type = other DNA
ttttcatagtattaagtgtt

SEQ ID NO: 12869 - DNA, 20 bp, synthetic construct
  misc_feature 1..20: note = Description of Artificial Sequence: Synthetic oligonucleotide
  misc_feature 1..20: note = Target: ANGPTL3; (-) strand; PAM type: YTN; PAM sequence: TTT
  source 1..20: mol_type = other DNA
gttttcatagtattaagtgt

SEQ ID NO: 12870 - DNA, 20 bp, synthetic construct
  misc_feature 1..20: note = Description of Artificial Sequence: Synthetic oligonucleotide
  misc_feature 1..20: note = Target: ANGPTL3; (-) strand; PAM type: YTN; PAM sequence: TTA
  source 1..20: mol_type = other DNA
tttgttttcatagtattaag

SEQ ID NO: 12871 - DNA, 20 bp, synthetic construct
  misc_feature 1..20: note = Description of Artificial Sequence: Synthetic oligonucleotide
  misc_feature 1..20: note = Target: ANGPTL3; (-) strand; PAM type: YTN; PAM sequence: TTA
  source 1..20: mol_type = other DNA
caattatttgttttcatagt

SEQ ID NO: 12872 - DNA, 20 bp, synthetic construct
  misc_feature 1..20: note = Description of Artificial Sequence: Synthetic oligonucleotide
  misc_feature 1..20: note = Target: ANGPTL3; (-) strand; PAM type: YTN; PAM sequence: TTT
  source 1..20: mol_type = other DNA
acaattatttgttttcatag

SEQ ID NO: 12873 - DNA, 20 bp, synthetic construct
  misc_feature 1..20: note = Description of Artificial Sequence: Synthetic oligonucleotide
  misc_feature 1..20: note = Target: ANGPTL3; (-) strand; PAM type: YTN; PAM sequence: CTT
  source 1..20: mol_type = other DNA
tacaattatttgttttcata

SEQ ID NO: 12874 - DNA, 20 bp, synthetic construct
  misc_feature 1..20: note = Description of Artificial Sequence: Synthetic oligonucleotide
  misc_feature 1..20: note = Target: ANGPTL3; (-) strand; PAM type: YTN; PAM sequence: TTC
  source 1..20: mol_type = other DNA
ctttacaattatttgttttc

SEQ ID NO: 12875 - DNA, 20 bp, synthetic construct
  misc_feature 1..20: note = Description of Artificial Sequence: Synthetic oligonucleotide
  misc_feature 1..20: note = Target: ANGPTL3; (-) strand; PAM type: YTN; PAM sequence: CTG
  source 1..20: mol_type = other DNA
acaagattcctttacaatta

SEQ ID NO: 12876 - DNA, 20 bp, synthetic construct
  misc_feature 1..20: note = Description of Artificial Sequence: Synthetic oligonucleotide
  misc_feature 1..20: note = Target: ANGPTL3; (-) strand; PAM type: YTN; PAM sequence: CTG
  source 1..20: mol_type = other DNA
taatctgacaagattccttt

SEQ ID NO: 12877 - DNA, 20 bp, synthetic construct
  misc_feature 1..20: note = Description of Artificial Sequence: Synthetic oligonucleotide
  misc_feature 1..20: note = Target: ANGPTL3; (-) strand; PAM type: YTN; PAM sequence: TTA
  source 1..20: mol_type = other DNA
ctgtaatctgacaagattcc

SEQ ID NO: 12878 - DNA, 20 bp, synthetic construct
  misc_feature 1..20: note = Description of Artificial Sequence: Synthetic oligonucleotide
  misc_feature 1..20: note = Target: ANGPTL3; (-) strand; PAM type: YTN; PAM sequence: CTT
  source 1..20: mol_type = other DNA
actgtaatctgacaagattc

SEQ ID NO: 12879 - DNA, 20 bp, synthetic construct
  misc_feature 1..20: note = Description of Artificial Sequence: Synthetic oligonucleotide
  misc_feature 1..20: note = Target: ANGPTL3; (-) strand; PAM type: YTN; PAM sequence: TTC
  source 1..20: mol_type = other DNA
ttactgtaatctgacaagat

SEQ ID NO: 12880 - DNA, 20 bp, synthetic construct
  misc_feature 1..20: note = Description of Artificial Sequence: Synthetic oligonucleotide
  misc_feature 1..20: note = Target: ANGPTL3; (-) strand; PAM type: YTN; PAM sequence: TTC
  source 1..20: mol_type = other DNA
attcttactgtaatctgaca

SEQ ID NO: 12881 - DNA, 20 bp, synthetic construct
  misc_feature 1..20: note = Description of Artificial Sequence: Synthetic oligonucleotide
  misc_feature 1..20: note = Target: ANGPTL3; (-) strand; PAM type: YTN; PAM sequence: CTC
  source 1..20: mol_type = other DNA
gatgccacaaatatgttcat

SEQ ID NO: 12882 - DNA, 20 bp, synthetic construct
  misc_feature 1..20: note = Description of Artificial Sequence: Synthetic oligonucleotide
  misc_feature 1..20: note = Target: ANGPTL3; (-) strand; PAM type: YTN; PAM sequence: TTA
  source 1..20: mol_type = other DNA
actcgatgccacaaatatgt

SEQ ID NO: 12883 - DNA, 20 bp, synthetic construct
  misc_feature 1..20: note = Description of Artificial Sequence: Synthetic oligonucleotide
  misc_feature 1..20: note = Target: ANGPTL3; (-) strand; PAM type: YTN; PAM sequence: TTT
  source 1..20: mol_type = other DNA
aactcgatgccacaaatatg

SEQ ID NO: 12884 - DNA, 20 bp, synthetic construct
  misc_feature 1..20: note = Description of Artificial Sequence: Synthetic oligonucleotide
  misc_feature 1..20: note = Target: ANGPTL3; (-) strand; PAM type: YTN; PAM sequence: CTT
  source 1..20: mol_type = other DNA
taactcgatgccacaaatat

SEQ ID NO: 12885 - DNA, 20 bp, synthetic construct
  misc_feature 1..20: note = Description of Artificial Sequence: Synthetic oligonucleotide
  misc_feature 1..20: note = Target: ANGPTL3; (-) strand; PAM type: YTN; PAM sequence: TTA
  source 1..20: mol_type = other DNA
ggggaaatataaactttaac

SEQ ID NO: 12886 - DNA, 20 bp, synthetic construct
  misc_feature 1..20: note = Description of Artificial Sequence: Synthetic oligonucleotide
  misc_feature 1..20: note = Target: ANGPTL3; (-) strand; PAM type: YTN; PAM sequence: TTT
  source 1..20: mol_type = other DNA
aggggaaatataaactttaa

SEQ ID NO: 12887 - DNA, 20 bp, synthetic construct
  misc_feature 1..20: note = Description of Artificial Sequence: Synthetic oligonucleotide
  misc_feature 1..20: note = Target: ANGPTL3; (-) strand; PAM type: YTN; PAM sequence: TTA
  source 1..20: mol_type = other DNA
gaatcacagcatatttaggg

SEQ ID NO: 12888 - DNA, 20 bp, synthetic construct
  misc_feature 1..20: note = Description of Artificial Sequence: Synthetic oligonucleotide
  misc_feature 1..20: note = Target: ANGPTL3; (-) strand; PAM type: YTN; PAM sequence: CTA
  source 1..20: mol_type = other DNA
cacgaatgtattagaatcac

SEQ ID NO: 12889 - DNA, 20 bp, synthetic construct
  misc_feature 1..20: note = Description of Artificial Sequence: Synthetic oligonucleotide
  misc_feature 1..20: note = Target: ANGPTL3; (-) strand; PAM type: YTN; PAM sequence: TTG
  source 1..20: mol_type = other DNA
aaaacctacacgaatgtatt

SEQ ID NO: 12890 - DNA, 20 bp, synthetic construct
  misc_feature 1..20: note = Description of Artificial Sequence: Synthetic oligonucleotide
  misc_feature 1..20: note = Target: ANGPTL3; (-) strand; PAM type: YTN; PAM sequence: CTT
  source 1..20: mol_type = other DNA
gaaaacctacacgaatgtat

SEQ ID NO: 12891 - DNA, 20 bp, synthetic construct
  misc_feature 1..20: note = Description of Artificial Sequence: Synthetic oligonucleotide
  misc_feature 1..20: note = Target: ANGPTL3; (-) strand; PAM type: YTN; PAM sequence: CTA
  source 1..20: mol_type = other DNA
cttgaaaacctacacgaatg

SEQ ID NO: 12892 - DNA, 20 bp, synthetic construct
  misc_feature 1..20: note = Description of Artificial Sequence: Synthetic oligonucleotide
  misc_feature 1..20: note = Target: ANGPTL3; (-) strand; PAM type: YTN; PAM sequence: TTC
  source 1..20: mol_type = other DNA
tacttgaaaacctacacgaa

SEQ ID NO: 12893 - DNA, 20 bp, synthetic construct
  misc_feature 1..20: note = Description of Artificial Sequence: Synthetic oligonucleotide
  misc_feature 1..20: note = Target: ANGPTL3; (-) strand; PAM type: YTN; PAM sequence: TTT
  source 1..20: mol_type = other DNA
ctacttgaaaacctacacga

SEQ ID NO: 12894 - DNA, 20 bp, synthetic construct
  misc_feature 1..20: note = Description of Artificial Sequence: Synthetic oligonucleotide
  misc_feature 1..20: note = Target: ANGPTL3; (-) strand; PAM type: YTN; PAM sequence: TTA
  source 1..20: mol_type = other DNA
tttctacttgaaaacctaca

SEQ ID NO: 12895 - DNA, 20 bp, synthetic construct
  misc_feature 1..20: note = Description of Artificial Sequence: Synthetic oligonucleotide
  misc_feature 1..20: note = Target: ANGPTL3; (-) strand; PAM type: YTN; PAM sequence: TTT
  source 1..20: mol_type = other DNA
atttctacttgaaaacctac

SEQ ID NO: 12896 - DNA, 20 bp, synthetic construct
  misc_feature 1..20: note = Description of Artificial Sequence: Synthetic oligonucleotide
  misc_feature 1..20: note = Target: ANGPTL3; (-) strand; PAM type: YTN; PAM sequence: TTA
  source 1..20: mol_type = other DNA
cgaggtttatttctacttga

SEQ ID NO: 12897 - DNA, 20 bp, synthetic construct
  misc_feature 1..20: note = Description of Artificial Sequence: Synthetic oligonucleotide
  misc_feature 1..20: note = Target: ANGPTL3; (-) strand; PAM type: YTN; PAM sequence: TTG
  source 1..20: mol_type = other DNA
ttacgaggtttatttctact

SEQ ID NO: 12898 - DNA, 20 bp, synthetic construct
  misc_feature 1..20: note = Description of Artificial Sequence: Synthetic oligonucleotide
  misc_feature 1..20: note = Target: ANGPTL3; (-) strand; PAM type: YTN; PAM sequence: CTT
  source 1..20: mol_type = other DNA
gttacgaggtttatttctac

SEQ ID NO: 12899 - DNA, 20 bp, synthetic construct
  misc_feature 1..20: note = Description of Artificial Sequence: Synthetic oligonucleotide
  misc_feature 1..20: note = Target: ANGPTL3; (-) strand; PAM type: YTN; PAM sequence: TTC
  source 1..20: mol_type = other DNA
agtaacttgttacgaggttt

SEQ ID NO: 12900 - DNA, 20 bp, synthetic construct
  misc_feature 1..20: note = Description of Artificial Sequence: Synthetic oligonucleotide
  misc_feature 1..20: note = Target: ANGPTL3; (-) strand; PAM type: YTN; PAM sequence: TTA
  source 1..20: mol_type = other DNA
aacgttcagtaacttgttac

SEQ ID NO: 12901 - DNA, 20 bp, synthetic construct
  misc_feature 1..20: note = Description of Artificial Sequence: Synthetic oligonucleotide
  misc_feature 1..20: note = Target: ANGPTL3; (-) strand; PAM type: YTN; PAM sequence: TTT
  source 1..20: mol_type = other DNA
aaacgttcagtaacttgtta

SEQ ID NO: 12902 - DNA, 20 bp, synthetic construct
  misc_feature 1..20: note = Description of Artificial Sequence: Synthetic oligonucleotide
  misc_feature 1..20: note = Target: ANGPTL3; (-) strand; PAM type: YTN; PAM sequence: CTG
  source 1..20: mol_type = other DNA
tttaaacgttcagtaacttg

SEQ ID NO: 12903 - DNA, 20 bp, synthetic construct
  misc_feature 1..20: note = Description of Artificial Sequence: Synthetic oligonucleotide
  misc_feature 1..20: note = Target: ANGPTL3; (-) strand; PAM type: YTN; PAM sequence: TTG
  source 1..20: mol_type = other DNA
tcaggctgtttaaacgttca

SEQ ID NO: 12904 - DNA, 20 bp, synthetic construct
  misc_feature 1..20: note = Description of Artificial Sequence: Synthetic oligonucleotide
  misc_feature 1..20: note = Target: ANGPTL3; (-) strand; PAM type: YTN; PAM sequence: CTT
  source 1..20: mol_type = other DNA
gtcaggctgtttaaacgttc

SEQ ID NO: 12905 - DNA, 20 bp, synthetic construct
  misc_feature 1..20: note = Description of Artificial Sequence: Synthetic oligonucleotide
  misc_feature 1..20: note = Target: ANGPTL3; (-) strand; PAM type: YTN; PAM sequence: TTA
  source 1..20: mol_type = other DNA
aacatatatacatgcttgtc

SEQ ID NO: 12906 - DNA, 20 bp, synthetic construct
  misc_feature 1..20: note = Description of Artificial Sequence: Synthetic oligonucleotide
  misc_feature 1..20: note = Target: ANGPTL3; (-) strand; PAM type: YTN; PAM sequence: TTT
  source 1..20: mol_type = other DNA
aaacatatatacatgcttgt

SEQ ID NO: 12907 - DNA, 20 bp, synthetic construct
  misc_feature 1..20: note = Description of Artificial Sequence: Synthetic oligonucleotide
  misc_feature 1..20: note = Target: ANGPTL3; (-) strand; PAM type: YTN; PAM sequence: TTT
  source 1..20: mol_type = other DNA
taaacatatatacatgcttg

SEQ ID NO: 12908 - DNA, 20 bp, synthetic construct
  misc_feature 1..20: note = Description of Artificial Sequence: Synthetic oligonucleotide
  misc_feature 1..20: note = Target: ANGPTL3; (-) strand; PAM type: YTN; PAM sequence: TTG
  source 1..20: mol_type = other DNA
aattttaaacatatatacat

SEQ ID NO: 12909 - DNA, 20 bp, synthetic construct
  misc_feature 1..20: note = Description of Artificial Sequence: Synthetic oligonucleotide
  misc_feature 1..20: note = Target: ANGPTL3; (-) strand; PAM type: YTN; PAM sequence: TTA
  source 1..20: mol_type = other DNA
ttgaattttaaacatatata

SEQ ID NO: 12910 - DNA, 20 bp, synthetic construct
  misc_feature 1..20: note = Description of Artificial Sequence: Synthetic oligonucleotide
  misc_feature 1..20: note = Target: ANGPTL3; (-) strand; PAM type: YTN; PAM sequence: TTT
  source 1..20: mol_type = other DNA
attgaattttaaacatatat

SEQ ID NO: 12911 - DNA, 20 bp, synthetic construct
  misc_feature 1..20: note = Description of Artificial Sequence: Synthetic oligonucleotide
  misc_feature 1..20: note = Target: ANGPTL3; (-) strand; PAM type: YTN; PAM sequence: TTG
  source 1..20: mol_type = other DNA
tttattgaattttaaacata

SEQ ID NO: 12912 - DNA, 20 bp, synthetic construct
  misc_feature 1..20: note = Description of Artificial Sequence: Synthetic oligonucleotide
  misc_feature 1..20: note = Target: ANGPTL3; (-) strand; PAM type: YTN; PAM sequence: TTT
  source 1..20: mol_type = other DNA
gtttattgaattttaaacat

SEQ ID NO: 12913 - DNA, 20 bp, synthetic construct
  misc_feature 1..20: note = Description of Artificial Sequence: Synthetic oligonucleotide
  misc_feature 1..20: note = Target: ANGPTL3; (-) strand; PAM type: YTN; PAM sequence: CTT
  source 1..20: mol_type = other DNA
tgtttattgaattttaaaca

SEQ ID NO: 12914 - DNA, 20 bp, synthetic construct
  misc_feature 1..20: note = Description of Artificial Sequence: Synthetic oligonucleotide
  misc_feature 1..20: note = Target: ANGPTL3; (-) strand; PAM type: YTN; PAM sequence: CTG
  source 1..20: mol_type = other DNA
ggtctttgtttattgaattt

SEQ ID NO: 12915 - DNA, 20 bp, synthetic construct
  misc_feature 1..20: note = Description of Artificial Sequence: Synthetic oligonucleotide
  misc_feature 1..20: note = Target: ANGPTL3; (-) strand; PAM type: YTN; PAM sequence: TTA
  source 1..20: mol_type = other DNA
gggactgggtctttgtttat

SEQ ID NO: 12916 - DNA, 20 bp, synthetic construct
  misc_feature 1..20: note = Description of Artificial Sequence: Synthetic oligonucleotide
  misc_feature 1..20: note = Target: ANGPTL3; (-) strand; PAM type: YTN; PAM sequence: TTT
  source 1..20: mol_type = other DNA
agggactgggtctttgttta

SEQ ID NO: 12917 - DNA, 20 bp, synthetic construct
  misc_feature 1..20: note = Description of Artificial Sequence: Synthetic oligonucleotide
  misc_feature 1..20: note = Target: ANGPTL3; (-) strand; PAM type: YTN; PAM sequence: CTA
  source 1..20: mol_type = other DNA
taatttagggactgggtctt

SEQ ID NO: 12918 - DNA, 20 bp, synthetic construct
  misc_feature 1..20: note = Description of Artificial Sequence: Synthetic oligonucleotide
  misc_feature 1..20: note = Target: ANGPTL3; (-) strand; PAM type: YTN; PAM sequence: TTC
  source 1..20: mol_type = other DNA
tataatttagggactgggtc

SEQ ID NO: 12919 - DNA, 20 bp, synthetic construct
  misc_feature 1..20: note = Description of Artificial Sequence: Synthetic oligonucleotide
  misc_feature 1..20: note = Target: ANGPTL3; (-) strand; PAM type: YTN; PAM sequence: TTT
  source 1..20: mol_type = other DNA
ctataatttagggactgggt

SEQ ID NO: 12920 - DNA, 20 bp, synthetic construct
  misc_feature 1..20: note = Description of Artificial Sequence: Synthetic oligonucleotide
  misc_feature 1..20: note = Target: ANGPTL3; (-) strand; PAM type: YTN; PAM sequence: TTA
  source 1..20: mol_type = other DNA
aatttctataatttagggac

SEQ ID NO: 12921 - DNA, 20 bp, synthetic construct
  misc_feature 1..20: note = Description of Artificial Sequence: Synthetic oligonucleotide
  misc_feature 1..20: note = Target: ANGPTL3; (-) strand; PAM type: YTN; PAM sequence: TTT
  source 1..20: mol_type = other DNA
aaatttctataatttaggga

SEQ ID NO: 12922 - DNA, 20 bp, synthetic construct
  misc_feature 1..20: note = Description of Artificial Sequence: Synthetic oligonucleotide
  misc_feature 1..20: note = Target: ANGPTL3; (-) strand; PAM type: YTN; PAM sequence: TTG
  source 1..20: mol_type = other DNA
tgatgtcgataaacatgcaa

SEQ ID NO: 12923 - DNA, 20 bp, synthetic construct
  misc_feature 1..20: note = Description of Artificial Sequence: Synthetic oligonucleotide
  misc_feature 1..20: note = Target: ANGPTL3; (-) strand; PAM type: YTN; PAM sequence: CTG
  source 1..20: mol_type = other DNA
ttgtgatgtcgataaacatg

SEQ ID NO: 12924 - DNA, 20 bp, synthetic construct
  misc_feature 1..20: note = Description of Artificial Sequence: Synthetic oligonucleotide
  misc_feature 1..20: note = Target: ANGPTL3; (-) strand; PAM type: YTN; PAM sequence: TTA
  source 1..20: mol_type = other DNA
gggatctgttgtgatgtcga

SEQ ID NO: 12925 - DNA, 20 bp, synthetic construct
  misc_feature 1..20: note = Description of Artificial Sequence: Synthetic oligonucleotide
  misc_feature 1..20: note = Target: ANGPTL3; (-) strand; PAM type: YTN; PAM sequence: TTT
  source 1..20: mol_type = other DNA
agggatctgttgtgatgtcg

SEQ ID NO: 12926 - DNA, 20 bp, synthetic construct
  misc_feature 1..20: note = Description of Artificial Sequence: Synthetic oligonucleotide
  misc_feature 1..20: note = Target: ANGPTL3; (-) strand; PAM type: YTN; PAM sequence: TTA
  source 1..20: mol_type = other DNA
gggatttagggatctgttgt

SEQ ID NO: 12927 - DNA, 20 bp, synthetic construct
  misc_feature 1..20: note = Description of Artificial Sequence: Synthetic oligonucleotide
  misc_feature 1..20: note = Target: ANGPTL3; (-) strand; PAM type: YTN; PAM sequence: TTT
  source 1..20: mol_type = other DNA
agggatttagggatctgttg

SEQ ID NO: 12928 - DNA, 20 bp, synthetic construct
  misc_feature 1..20: note = Description of Artificial Sequence: Synthetic oligonucleotide
  misc_feature 1..20: note = Target: ANGPTL3; (-) strand; PAM type: YTN; PAM sequence: TTA
  source 1..20: mol_type = other DNA
gggatttagggatttaggga

SEQ ID NO: 12929 - DNA, 20 bp, synthetic construct
  misc_feature 1..20: note = Description of Artificial Sequence: Synthetic oligonucleotide
  misc_feature 1..20: note = Target: ANGPTL3; (-) strand; PAM type: YTN; PAM sequence: TTT
  source 1..20: mol_type = other DNA
agggatttagggatttaggg

SEQ ID NO: 12930 - DNA, 20 bp, synthetic construct
  misc_feature 1..20: note = Description of Artificial Sequence: Synthetic oligonucleotide
  misc_feature 1..20: note = Target: ANGPTL3; (-) strand; PAM type: YTN; PAM sequence: CTT
  source 1..20: mol_type = other DNA
tagggatttagggatttagg

SEQ ID NO: 12931 - DNA, 20 bp, synthetic construct
  misc_feature 1..20: note = Description of Artificial Sequence: Synthetic oligonucleotide
  misc_feature 1..20: note = Target: ANGPTL3; (-) strand; PAM type: YTN; PAM sequence: CTA
  source 1..20: mol_type = other DNA
atctttagggatttagggat

SEQ ID NO: 12932 - DNA, 20 bp, synthetic construct
  misc_feature 1..20: note = Description of Artificial Sequence: Synthetic oligonucleotide
  misc_feature 1..20: note = Target: ANGPTL3; (-) strand; PAM type: YTN; PAM sequence: TTG
  source 1..20: mol_type = other DNA
tatctaatctttagggattt

SEQ ID NO: 12933 - DNA, 20 bp, synthetic construct
  misc_feature 1..20: note = Description of Artificial Sequence: Synthetic oligonucleotide
  misc_feature 1..20: note = Target: ANGPTL3; (-) strand; PAM type: YTN; PAM sequence: TTT
  source 1..20: mol_type = other DNA
gtatctaatctttagggatt

SEQ ID NO: 12934 - DNA, 20 bp, synthetic construct
  misc_feature 1..20: note = Description of Artificial Sequence: Synthetic oligonucleotide
  misc_feature 1..20: note = Target: ANGPTL3; (-) strand; PAM type: YTN; PAM sequence: CTG
  source 1..20: mol_type = other DNA
tggtaaaaaatttgtatcta

SEQ ID NO: 12935 - DNA, 20 bp, synthetic construct
  misc_feature 1..20: note = Description of Artificial Sequence: Synthetic oligonucleotide
  misc_feature 1..20: note = Target: ANGPTL3; (-) strand; PAM type: YTN; PAM sequence: CTG
  source 1..20: mol_type = other DNA
acaagtgatactgtggtaaa

SEQ ID NO: 12936 - DNA, 20 bp, synthetic construct
  misc_feature 1..20: note = Description of Artificial Sequence: Synthetic oligonucleotide
  misc_feature 1..20: note = Target: ANGPTL3; (-) strand; PAM type: YTN; PAM sequence: TTC
  source 1..20: mol_type = other DNA
tgacaagtgatactgtggta

SEQ ID NO: 12937 - DNA, 20 bp, synthetic construct
  misc_feature 1..20: note = Description of Artificial Sequence: Synthetic oligonucleotide
  misc_feature 1..20: note = Target: ANGPTL3; (-) strand; PAM type: YTN; PAM sequence: TTA
  source 1..20: mol_type = other DNA
aaaataaattctgacaagtg

SEQ ID NO: 12938 - DNA, 20 bp, synthetic construct
  misc_feature 1..20: note = Description of Artificial Sequence: Synthetic oligonucleotide
  misc_feature 1..20: note = Target: ANGPTL3; (-) strand; PAM type: YTN; PAM sequence: TTT
  source 1..20: mol_type = other DNA
aaaaataaattctgacaagt

SEQ ID NO: 12939 - DNA, 20 bp, synthetic construct
  misc_feature 1..20: note = Description of Artificial Sequence: Synthetic oligonucleotide
  misc_feature 1..20: note = Target: ANGPTL3; (-) strand; PAM type: YTN; PAM sequence: TTA
  source 1..20: mol_type = other DNA
aaaaatcatatttaaaaata

SEQ ID NO: 12940 - DNA, 20 bp, synthetic construct
  misc_feature 1..20: note = Description of Artificial Sequence: Synthetic oligonucleotide
  misc_feature 1..20: note = Target: ANGPTL3; (-) strand; PAM type: YTN; PAM sequence: TTT
  source 1..20: mol_type = other DNA
aaaaaatcatatttaaaaat

SEQ ID NO: 12941 - DNA, 20 bp, synthetic construct
  misc_feature 1..20: note = Description of Artificial Sequence: Synthetic oligonucleotide
  misc_feature 1..20: note = Target: ANGPTL3; (-) strand; PAM type: YTN; PAM sequence: TTT
  source 1..20: mol_type = other DNA
taaaaaatcatatttaaaaa

SEQ ID NO: 12942 - DNA, 20 bp, synthetic construct
  misc_feature 1..20: note = Description of Artificial Sequence: Synthetic oligonucleotide
  misc_feature 1..20: note = Target: ANGPTL3; (-) strand; PAM type: YTN; PAM sequence: CTG
  source 1..20: mol_type = other DNA
gcagttttaaaaaatcatat

SEQ ID NO: 12943 - DNA, 20 bp, synthetic construct
  misc_feature 1..20: note = Description of Artificial Sequence: Synthetic oligonucleotide
  misc_feature 1..20: note = Target: ANGPTL3; (-) strand; PAM type: YTN; PAM sequence: TTA
  source 1..20: mol_type = other DNA
ctggcagttttaaaaaatca

SEQ ID NO: 12944 - DNA, 20 bp, synthetic construct
  misc_feature 1..20: note = Description of Artificial Sequence: Synthetic oligonucleotide
  misc_feature 1..20: note = Target: ANGPTL3; (-) strand; PAM type: YTN; PAM sequence: CTT
  source 1..20: mol_type = other DNA
actggcagttttaaaaaatc

SEQ ID NO: 12945 - DNA, 20 bp, synthetic construct
  misc_feature 1..20: note = Description of Artificial Sequence: Synthetic oligonucleotide
  misc_feature 1..20: note = Target: ANGPTL3; (-) strand; PAM type: YTN; PAM sequence: TTC
  source 1..20: mol_type = other DNA
ttactggcagttttaaaaaa

SEQ ID NO: 12946 - DNA, 20 bp, synthetic construct
  misc_feature 1..20: note = Description of Artificial Sequence: Synthetic oligonucleotide
  misc_feature 1..20: note = Target: ANGPTL3; (-) strand; PAM type: YTN; PAM sequence: TTT
  source 1..20: mol_type = other DNA
cttactggcagttttaaaaa

SEQ ID NO: 12947 - DNA, 20 bp, synthetic construct
  misc_feature 1..20: note = Description of Artificial Sequence: Synthetic oligonucleotide
  misc_feature 1..20: note = Target: ANGPTL3; (-) strand; PAM type: YTN; PAM sequence: TTA
  source 1..20: mol_type = other DNA
aaatttcttactggcagttt

SEQ ID NO: 12948 - DNA, 20 bp, synthetic construct
  misc_feature 1..20: note = Description of Artificial Sequence: Synthetic oligonucleotide
  misc_feature 1..20: note = Target: ANGPTL3; (-) strand; PAM type: YTN; PAM sequence: TTT
  source 1..20: mol_type = other DNA
aaaatttcttactggcagtt

SEQ ID NO: 12949 - DNA, 20 bp, synthetic construct
  misc_feature 1..20: note = Description of Artificial Sequence: Synthetic oligonucleotide
  misc_feature 1..20: note = Target: ANGPTL3; (-) strand; PAM type: YTN; PAM sequence: TTA
  source 1..20: mol_type = other DNA
atttaaaatttcttactggc

SEQ ID NO: 12950 - DNA, 20 bp, synthetic construct
  misc_feature 1..20: note = Description of Artificial Sequence: Synthetic oligonucleotide
  misc_feature 1..20: note = Target: ANGPTL3; (-) strand; PAM type: YTN; PAM sequence: TTT
  source 1..20: mol_type = other DNA
aatttaaaatttcttactgg

SEQ ID NO: 12951 - DNA, 20 bp, synthetic construct
  misc_feature 1..20: note = Description of Artificial Sequence: Synthetic oligonucleotide
  misc_feature 1..20: note = Target: ANGPTL3; (-) strand; PAM type: YTN; PAM sequence: TTA
  source 1..20: mol_type = other DNA
acaaatgggtttaatttaaa

SEQ ID NO: 12952 - DNA, 20 bp, synthetic construct
  misc_feature 1..20: note = Description of Artificial Sequence: Synthetic oligonucleotide
  misc_feature 1..20: note = Target: ANGPTL3; (-) strand; PAM type: YTN; PAM sequence: TTT
  source 1..20: mol_type = other DNA
aacaaatgggtttaatttaa

SEQ ID NO: 12953 - DNA, 20 bp, synthetic construct
  misc_feature 1..20: note = Description of Artificial Sequence: Synthetic oligonucleotide
  misc_feature 1..20: note = Target: ANGPTL3; (-) strand; PAM type: YTN; PAM sequence: CTT
  source 1..20: mol_type = other DNA
taacaaatgggtttaattta

SEQ ID NO: 12954 - DNA, 20 bp, synthetic construct
  misc_feature 1..20: note = Description of Artificial Sequence: Synthetic oligonucleotide
  misc_feature 1..20: note = Target: ANGPTL3; (-) strand; PAM type: YTN; PAM sequence: CTA
  source 1..20: mol_type = other DNA
tatcctttaacaaatgggtt

SEQ ID NO: 12955 - DNA, 20 bp, synthetic construct
  misc_feature 1..20: note = Description of Artificial Sequence: Synthetic oligonucleotide
  misc_feature 1..20: note = Target: ANGPTL3; (-) strand; PAM type: YTN; PAM sequence: TTG
  source 1..20: mol_type = other DNA
ggcactatatcctttaacaa

SEQ ID NO: 12956 - DNA, 20 bp, synthetic construct
  misc_feature 1..20: note = Description of Artificial Sequence: Synthetic oligonucleotide
  misc_feature 1..20: note = Target: ANGPTL3; (-) strand; PAM type: YTN; PAM sequence: CTT
  source 1..20: mol_type = other DNA
gggcactatatcctttaaca

SEQ ID NO: 12957 - DNA, 20 bp, synthetic construct
  misc_feature 1..20: note = Description of Artificial Sequence: Synthetic oligonucleotide
  misc_feature 1..20: note = Target: ANGPTL3; (-) strand; PAM type: YTN; PAM sequence: TTG
  source 1..20: mol_type = other DNA
acaaaggtaggtcaccatat

SEQ ID NO: 12958 - DNA, 20 bp, synthetic construct
  misc_feature 1..20: note = Description of Artificial Sequence: Synthetic oligonucleotide
  misc_feature 1..20: note = Target: ANGPTL3; (-) strand; PAM type: YTN; PAM sequence: CTA
  source 1..20: mol_type = other DNA
agtattgacaaaggtaggtc

SEQ ID NO: 12959 - DNA, 20 bp, synthetic construct
  misc_feature 1..20: note = Description of Artificial Sequence: Synthetic oligonucleotide
  misc_feature 1..20: note = Target: ANGPTL3; (-) strand; PAM type: YTN; PAM sequence: TTG
  source 1..20: mol_type = other DNA
aaatacataatgctaagtat

SEQ ID NO: 12960 - DNA, 20 bp, synthetic construct
  misc_feature 1..20: note = Description of Artificial Sequence: Synthetic oligonucleotide
  misc_feature 1..20: note = Target: ANGPTL3; (-) strand; PAM type: YTN; PAM sequence: TTT
  source 1..20: mol_type = other DNA
gaaatacataatgctaagta

SEQ ID NO: 12961 - DNA, 20 bp, synthetic construct
  misc_feature 1..20: note = Description of Artificial Sequence: Synthetic oligonucleotide
  misc_feature 1..20: note = Target: ANGPTL3; (-) strand; PAM type: YTN; PAM sequence: TTG
  source 1..20: mol_type = other DNA
gataatttgaaatacataat

SEQ ID NO: 12962 - DNA, 20 bp, synthetic construct
  misc_feature 1..20: note = Description of Artificial Sequence: Synthetic oligonucleotide
  misc_feature 1..20: note = Target: ANGPTL3; (-) strand; PAM type: YTN; PAM sequence: TTA
  source 1..20: mol_type = other DNA
tatatgtgacatataaaaat

SEQ ID NO: 12963 - DNA, 20 bp, synthetic construct
  misc_feature 1..20: note = Description of Artificial Sequence: Synthetic oligonucleotide
  misc_feature 1..20: note = Target: ANGPTL3; (-) strand; PAM type: YTN; PAM sequence: TTT
  source 1..20: mol_type = other DNA
atatatgtgacatataaaaa

SEQ ID NO: 12964 - DNA, 20 bp, synthetic construct
  misc_feature 1..20: note = Description of Artificial Sequence: Synthetic oligonucleotide
  misc_feature 1..20: note = Target: ANGPTL3; (-) strand; PAM type: YTN; PAM sequence: TTT
  source 1..20: mol_type = other DNA
tatatatgtgacatataaaa

SEQ ID NO: 12965 - DNA, 20 bp, synthetic construct
  misc_feature 1..20: note = Description of Artificial Sequence: Synthetic oligonucleotide
  misc_feature 1..20: note = Target: ANGPTL3; (-) strand; PAM type: YTN; PAM sequence: CTT
  source 1..20: mol_type = other DNA
ttatatatgtgacatataaa

SEQ ID NO: 12966 - DNA, 20 bp, synthetic construct
  misc_feature 1..20: note = Description of Artificial Sequence: Synthetic oligonucleotide
  misc_feature 1..20: note = Target: ANGPTL3; (-) strand; PAM type: YTN; PAM sequence: TTC
  source 1..20: mol_type = other DNA
acatagatcatacatatctt

SEQ ID NO: 12967 - DNA, 20 bp, synthetic construct
  misc_feature 1..20: note = Description of Artificial Sequence: Synthetic oligonucleotide
  misc_feature 1..20: note = Target: ANGPTL3; (-) strand; PAM type: YTN; PAM sequence: TTA
  source 1..20: mol_type = other DNA
ggattcacatagatcataca

SEQ ID NO: 12968 - DNA, 20 bp, synthetic construct
  misc_feature 1..20: note = Description of Artificial Sequence: Synthetic oligonucleotide
  misc_feature 1..20: note = Target: ANGPTL3; (-) strand; PAM type: YTN; PAM sequence: CTT
  source 1..20: mol_type = other DNA
aggattcacatagatcatac

SEQ ID NO: 12969 - DNA, 20 bp, synthetic construct
  misc_feature 1..20: note = Description of Artificial Sequence: Synthetic oligonucleotide
  misc_feature 1..20: note = Target: ANGPTL3; (-) strand; PAM type: YTN; PAM sequence: TTA
  source 1..20: mol_type = other DNA
cttaggattcacatagatca

SEQ ID NO: 12970 - DNA, 20 bp, synthetic construct
  misc_feature 1..20: note = Description of Artificial Sequence: Synthetic oligonucleotide
  misc_feature 1..20: note = Target: ANGPTL3; (-) strand; PAM type: YTN; PAM sequence: TTT
  source 1..20: mol_type = other DNA
acttaggattcacatagatc

SEQ ID NO: 12971 - DNA, 20 bp, synthetic construct
  misc_feature 1..20: note = Description of Artificial Sequence: Synthetic oligonucleotide
  misc_feature 1..20: note = Target: ANGPTL3; (-) strand; PAM type: YTN; PAM sequence: CTG
  source 1..20: mol_type = other DNA
gaacaaaatatttacttagg

SEQ ID NO: 12972 - DNA, 20 bp, synthetic construct
  misc_feature 1..20: note = Description of Artificial Sequence: Synthetic oligonucleotide
  misc_feature 1..20: note = Target: ANGPTL3; (-) strand; PAM type: YTN; PAM sequence: TTC
  source 1..20: mol_type = other DNA
tggaacaaaatatttactta

SEQ ID NO: 12973 - DNA, 20 bp, synthetic construct
  misc_feature 1..20: note = Description of Artificial Sequence: Synthetic oligonucleotide
  misc_feature 1..20: note = Target: ANGPTL3; (-) strand; PAM type: YTN; PAM sequence: TTT
  source 1..20: mol_type = other DNA
ctggaacaaaatatttactt

SEQ ID NO: 12974 - DNA, 20 bp, synthetic construct
  misc_feature 1..20: note = Description of Artificial Sequence: Synthetic oligonucleotide
  misc_feature 1..20: note = Target: ANGPTL3; (-) strand; PAM type: YTN; PAM sequence: TTT
  source 1..20: mol_type = other DNA
tctggaacaaaatatttact

SEQ ID NO: 12975 - DNA, 20 bp, synthetic construct
  misc_feature 1..20: note = Description of Artificial Sequence: Synthetic oligonucleotide
  misc_feature 1..20: note = Target: ANGPTL3; (-) strand; PAM type: YTN; PAM sequence: CTT
  source 1..20: mol_type = other DNA
ttctggaacaaaatatttac

SEQ ID NO: 12976 - DNA, 20 bp, synthetic construct
  misc_feature 1..20: note = Description of Artificial Sequence: Synthetic oligonucleotide
  misc_feature 1..20: note = Target: ANGPTL3; (-) strand; PAM type: YTN; PAM sequence: TTG
  source 1..20: mol_type = other DNA
tacttttctggaacaaaata

SEQ ID NO: 12977 - DNA, 20 bp, synthetic construct
  misc_feature 1..20: note = Description of Artificial Sequence: Synthetic oligonucleotide
  misc_feature 1..20: note = Target: ANGPTL3; (-) strand; PAM type: YTN; PAM sequence: TTT
  source 1..20: mol_type = other DNA
gtacttttctggaacaaaat

SEQ ID NO: 12978 - DNA, 20 bp, synthetic construct
  misc_feature 1..20: note = Description of Artificial Sequence: Synthetic oligonucleotide
  misc_feature 1..20: note = Target: ANGPTL3; (-) strand; PAM type: YTN; PAM sequence: TTT
  source 1..20: mol_type = other DNA
tgtacttttctggaacaaaa

SEQ ID NO: 12979 - DNA, 20 bp, synthetic construct
  misc_feature 1..20: note = Description of Artificial Sequence: Synthetic oligonucleotide
  misc_feature 1..20: note = Target: ANGPTL3; (-) strand; PAM type: YTN; PAM sequence: TTA
  source 1..20: mol_type = other DNA
ttttgtacttttctggaaca

SEQ ID NO: 12980 - DNA, 20 bp, synthetic construct
  misc_feature 1..20: note = Description of Artificial Sequence: Synthetic oligonucleotide
  misc_feature 1..20: note = Target: ANGPTL3; (-) strand; PAM type: YTN; PAM sequence: TTA
  source 1..20: mol_type = other DNA
ttattttgtacttttctgga

SEQ ID NO: 12981 - DNA, 20 bp, synthetic construct
  misc_feature 1..20: note = Description of Artificial Sequence: Synthetic oligonucleotide
  misc_feature 1..20: note = Target: ANGPTL3; (-) strand; PAM type: YTN; PAM sequence: TTT
  source 1..20: mol_type = other DNA
attattttgtacttttctgg

SEQ ID NO: 12982 - DNA, 20 bp, synthetic construct
  misc_feature 1..20: note = Description of Artificial Sequence: Synthetic oligonucleotide
  misc_feature 1..20: note = Target: ANGPTL3; (-) strand; PAM type: YTN; PAM sequence: CTT
  source 1..20: mol_type = other DNA
tattattttgtacttttctg

SEQ ID NO: 12983 - DNA, 20 bp, synthetic construct
  misc_feature 1..20: note = Description of Artificial Sequence: Synthetic oligonucleotide
  misc_feature 1..20: note = Target: ANGPTL3; (-) strand; PAM type: YTN; PAM sequence: TTA
  source 1..20: mol_type = other DNA
cctttattattttgtacttt

SEQ ID NO: 12984 - DNA, 20 bp, synthetic construct
  misc_feature 1..20: note = Description of Artificial Sequence: Synthetic oligonucleotide
  misc_feature 1..20: note = Target: ANGPTL3; (-) strand; PAM type: YTN; PAM sequence: TTT
  source 1..20: mol_type = other DNA
acctttattattttgtactt

SEQ ID NO: 12985 - DNA, 20 bp, synthetic construct
  misc_feature 1..20: note = Description of Artificial Sequence: Synthetic oligonucleotide
  misc_feature 1..20: note = Target: ANGPTL3; (-) strand; PAM type: YTN; PAM sequence: TTT
  source 1..20: mol_type = other DNA
tacctttattattttgtact

SEQ ID NO: 12986 - DNA, 20 bp, synthetic construct
  misc_feature 1..20: note = Description of Artificial Sequence: Synthetic oligonucleotide
  misc_feature 1..20: note = Target: ANGPTL3; (-) strand; PAM type: YTN; PAM sequence: TTT
  source 1..20: mol_type = other DNA
ttacctttattattttgtac

SEQ ID NO: 12987 - DNA, 20 bp, synthetic construct
  misc_feature 1..20: note = Description of Artificial Sequence: Synthetic oligonucleotide
  misc_feature 1..20: note = Target: ANGPTL3; (-) strand; PAM type: YTN; PAM sequence: TTA
  source 1..20: mol_type = other DNA
tttttacctttattattttg

SEQ ID NO: 12988 - DNA, 20 bp, synthetic construct
  misc_feature 1..20: note = Description of Artificial Sequence: Synthetic oligonucleotide
  misc_feature 1..20: note = Target: ANGPTL3; (-) strand; PAM type: YTN; PAM sequence: TTA
  source 1..20: mol_type = other DNA
tagattatttttacctttat

SEQ ID NO: 12989 - DNA, 20 bp, synthetic construct
  misc_feature 1..20: note = Description of Artificial Sequence: Synthetic oligonucleotide
  misc_feature 1..20: note = Target: ANGPTL3; (-) strand; PAM type: YTN; PAM sequence: CTG
  source 1..20: mol_type = other DNA
aaaattatagattattttta

SEQ ID NO: 12990 - DNA, 20 bp, synthetic construct
  misc_feature 1..20: note = Description of Artificial Sequence: Synthetic oligonucleotide
  misc_feature 1..20: note = Target: ANGPTL3; (-) strand; PAM type: YTN; PAM sequence: CTG
  source 1..20: mol_type = other DNA
tggtcctgaaaattatagat

SEQ ID NO: 12991 - DNA, 20 bp, synthetic construct
  misc_feature 1..20: note = Description of Artificial Sequence: Synthetic oligonucleotide
  misc_feature 1..20: note = Target: ANGPTL3; (-) strand; PAM type: YTN; PAM sequence: TTA
  source 1..20: mol_type = other DNA
gtctgtggtcctgaaaatta

SEQ ID NO: 12992 - DNA, 20 bp, synthetic construct
  misc_feature 1..20: note = Description of Artificial Sequence: Synthetic oligonucleotide
  misc_feature 1..20: note = Target: ANGPTL3; (-) strand; PAM type: YTN; PAM sequence: CTT
  source 1..20: mol_type = other DNA
agtctgtggtcctgaaaatt

SEQ ID NO: 12993 - DNA, 20 bp, synthetic construct
  misc_feature 1..20: note = Description of Artificial Sequence: Synthetic oligonucleotide
  misc_feature 1..20: note = Target: ANGPTL3; (-) strand; PAM type: YTN; PAM sequence: TTC
  source 1..20: mol_type = other DNA
gacagcttagtctgtggtcc

SEQ ID NO: 12994 - DNA, 20 bp, synthetic construct
  misc_feature 1..20: note = Description of Artificial Sequence: Synthetic oligonucleotide
  misc_feature 1..20: note = Target: ANGPTL3; (-) strand; PAM type: YTN; PAM sequence: TTT
  source 1..20: mol_type = other DNA
cgacagcttagtctgtggtc

SEQ ID NO: 12995 - DNA, 20 bp, synthetic construct
  misc_feature 1..20: note = Description of Artificial Sequence: Synthetic oligonucleotide
  misc_feature 1..20: note = Target: ANGPTL3; (-) strand; PAM type: YTN; PAM sequence: TTA
  source 1..20: mol_type = other DNA
atttcgacagcttagtctgt

SEQ ID NO: 12996 - DNA, 20 bp, synthetic construct
  misc_feature 1..20: note = Description of Artificial Sequence: Synthetic oligonucleotide
  misc_feature 1..20: note = Target: ANGPTL3; (-) strand; PAM type: YTN; PAM sequence: CTA
  source 1..20: mol_type = other DNA
aaaaaatcagcgttaatttc

SEQ ID NO: 12997 - DNA, 20 bp, synthetic construct
  misc_feature 1..20: note = Description of Artificial Sequence: Synthetic oligonucleotide
  misc_feature 1..20: note = Target: ANGPTL3; (-) strand; PAM type: YTN; PAM sequence: CTG
  source 1..20: mol_type = other DNA
gccctaaaaaaatcagcgtt

SEQ ID NO: 12998 - DNA, 20 bp, synthetic construct
  misc_feature 1..20: note = Description of Artificial Sequence: Synthetic oligonucleotide
  misc_feature 1..20: note = Target: ANGPTL3; (-) strand; PAM type: YTN; PAM sequence: TTC
  source 1..20: mol_type = other DNA
tggccctaaaaaaatcagcg

SEQ ID NO: 12999 - DNA, 20 bp, synthetic construct
  misc_feature 1..20: note = Description of Artificial Sequence: Synthetic oligonucleotide
  misc_feature 1..20: note = Target: ANGPTL3; (-) strand; PAM type: YTN; PAM sequence: TTG
  source 1..20: mol_type = other DNA
gtattctggccctaaaaaaa

SEQ ID NO: 13000 - DNA, 20 bp, synthetic construct
  misc_feature 1..20: note = Description of Artificial Sequence: Synthetic oligonucleotide
  misc_feature 1..20: note = Target: ANGPTL3; (-) strand; PAM type: YTN; PAM sequence: TTT
  source 1..20: mol_type = other DNA
ggtattctggccctaaaaaa

SEQ ID NO: 13001 - DNA, 20 bp, synthetic construct
  misc_feature 1..20: note = Description of Artificial Sequence: Synthetic oligonucleotide
  misc_feature 1..20: note = Target: ANGPTL3; (-) strand; PAM type: YTN; PAM sequence: TTT
  source 1..20: mol_type = other DNA
tggtattctggccctaaaaa

SEQ ID NO: 13002 - DNA, 20 bp, synthetic construct
  misc_feature 1..20: note = Description of Artificial Sequence: Synthetic oligonucleotide
  misc_feature 1..20: note = Target: ANGPTL3; (-) strand; PAM type: YTN; PAM sequence: TTG
  source 1..20: mol_type = other DNA
ggggaagagaggagccattt

SEQ ID NO: 13003 - DNA, 20 bp, synthetic construct
  misc_feature 1..20: note = Description of Artificial Sequence: Synthetic oligonucleotide
  misc_feature 1..20: note = Target: ANGPTL3; (-) strand; PAM type: YTN; PAM sequence: TTT
  source 1..20: mol_type = other DNA
gggggaagagaggagccatt

SEQ ID NO: 13004 - DNA, 20 bp, synthetic construct
  misc_feature 1..20: note = Description of Artificial Sequence: Synthetic oligonucleotide
  misc_feature 1..20: note = Target: ANGPTL3; (-) strand; PAM type: YTN; PAM sequence: TTT
  source 1..20: mol_type = other DNA
tgggggaagagaggagccat

SEQ ID NO: 13005 - DNA, 20 bp, synthetic construct
  misc_feature 1..20: note = Description of Artificial Sequence: Synthetic oligonucleotide
  misc_feature 1..20: note = Target: ANGPTL3; (-) strand; PAM type: YTN; PAM sequence: TTG
  source 1..20: mol_type = other DNA
tccaattttgggggaagaga

SEQ ID NO: 13006 - DNA, 20 bp, synthetic construct
  misc_feature 1..20: note = Description of Artificial Sequence: Synthetic oligonucleotide
  misc_feature 1..20: note = Target: ANGPTL3; (-) strand; PAM type: YTN; PAM sequence: TTG
  source 1..20: mol_type = other DNA
aaattgtccaattttggggg

SEQ ID NO: 13007 - DNA, 20 bp, synthetic construct
  misc_feature 1..20: note = Description of Artificial Sequence: Synthetic oligonucleotide
  misc_feature 1..20: note = Target: ANGPTL3; (-) strand; PAM type: YTN; PAM sequence: TTT
  source 1..20: mol_type = other DNA
gaaattgtccaattttgggg

SEQ ID NO: 13008 - DNA, 20 bp, synthetic construct
  misc_feature 1..20: note = Description of Artificial Sequence: Synthetic oligonucleotide
  misc_feature 1..20: note = Target: ANGPTL3; (-) strand; PAM type: YTN; PAM sequence: TTG
  source 1..20: mol_type = other DNA
catttgaaattgtccaattt

SEQ ID NO: 13009 - DNA, 20 bp, synthetic construct
  misc_feature 1..20: note = Description of Artificial Sequence: Synthetic oligonucleotide
  misc_feature 1..20: note = Target: ANGPTL3; (-) strand; PAM type: YTN; PAM sequence: TTT
  source 1..20: mol_type = other DNA
gcatttgaaattgtccaatt

SEQ ID NO: 13010 - DNA, 20 bp, synthetic construct
  misc_feature 1..20: note = Description of Artificial Sequence: Synthetic oligonucleotide
  misc_feature 1..20: note = Target: ANGPTL3; (-) strand; PAM type: YTN; PAM sequence: TTT
  source 1..20: mol_type = other DNA
tgcatttgaaattgtccaat

SEQ ID NO: 13011 - DNA, 20 bp, synthetic construct
  misc_feature 1..20: note = Description of Artificial Sequence: Synthetic oligonucleotide
  misc_feature 1..20: note = Target: ANGPTL3; (-) strand; PAM type: YTN; PAM sequence: TTA
  source 1..20: mol_type = other DNA
ttttgcatttgaaattgtcc

SEQ ID NO: 13012 - DNA, 20 bp, synthetic construct
  misc_feature 1..20: note = Description of Artificial Sequence: Synthetic oligonucleotide
  misc_feature 1..20: note = Target: ANGPTL3; (-) strand; PAM type: YTN; PAM sequence: TTA
  source 1..20: mol_type = other DNA
aataatgaattattttgcat

SEQ ID NO: 13013 - DNA, 20 bp, synthetic construct
  misc_feature 1..20: note = Description of Artificial Sequence: Synthetic oligonucleotide
  misc_feature 1..20: note = Target: ANGPTL3; (-) strand; PAM type: YTN; PAM sequence: CTC
  source 1..20: mol_type = other DNA
atatattaaataatgaatta

SEQ ID NO: 13014 - DNA, 20 bp, synthetic construct
  misc_feature 1..20: note = Description of Artificial Sequence: Synthetic oligonucleotide
  misc_feature 1..20: note = Target: ANGPTL3; (-) strand; PAM type: YTN; PAM sequence: TTA
  source 1..20: mol_type = other DNA
aggaaaccaaatagaggaag

SEQ ID NO: 13015 - DNA, 20 bp, synthetic construct
  misc_feature 1..20: note = Description of Artificial Sequence: Synthetic oligonucleotide
  misc_feature 1..20: note = Target: ANGPTL3; (-) strand; PAM type: YTN; PAM sequence: TTT
  source 1..20: mol_type = other DNA
aaggaaaccaaatagaggaa

SEQ ID NO: 13016 - DNA, 20 bp, synthetic construct
  misc_feature 1..20: note = Description of Artificial Sequence: Synthetic oligonucleotide
  misc_feature 1..20: note = Target: ANGPTL3; (-) strand; PAM type: YTN; PAM sequence: TTT
  source 1..20: mol_type = other DNA
taaggaaaccaaatagagga

SEQ ID NO: 13017 - DNA, 20 bp, synthetic construct
  misc_feature 1..20: note = Description of Artificial Sequence: Synthetic oligonucleotide
  misc_feature 1..20: note = Target: ANGPTL3; (-) strand; PAM type: YTN; PAM sequence: TTT
  source 1..20: mol_type = other DNA
ttaaggaaaccaaatagagg

SEQ ID NO: 13018 - DNA, 20 bp, synthetic construct
  misc_feature 1..20: note = Description of Artificial Sequence: Synthetic oligonucleotide
  misc_feature 1..20: note = Target: ANGPTL3; (-) strand; PAM type: YTN; PAM sequence: TTT
  source 1..20: mol_type = other DNA
tttaaggaaaccaaatagag

SEQ ID NO: 13019 - DNA, 20 bp, synthetic construct
  misc_feature 1..20: note = Description of Artificial Sequence: Synthetic oligonucleotide
  misc_feature 1..20: note = Target: ANGPTL3; (-) strand; PAM type: YTN; PAM sequence: TTT
  source 1..20: mol_type = other DNA
ttttaaggaaaccaaataga

SEQ ID NO: 13020 - DNA, 20 bp, synthetic construct
  misc_feature 1..20: note = Description of Artificial Sequence: Synthetic oligonucleotide
  misc_feature 1..20: note = Target: ANGPTL3; (-) strand; PAM type: YTN; PAM sequence: TTT
  source 1..20: mol_type = other DNA
tttttaaggaaaccaaatag

SEQ ID NO: 13021 - DNA, 20 bp, synthetic construct
  misc_feature 1..20: note = Description of Artificial Sequence: Synthetic oligonucleotide
  misc_feature 1..20: note = Target: ANGPTL3; (-) strand; PAM type: YTN; PAM sequence: TTT
  source 1..20: mol_type = other DNA
ttttttaaggaaaccaaata

SEQ ID NO: 13022 - DNA, 20 bp, synthetic construct
  misc_feature 1..20: note = Description of Artificial Sequence: Synthetic oligonucleotide
  misc_feature 1..20: note = Target: ANGPTL3; (-) strand; PAM type: YTN; PAM sequence: TTT
  source 1..20: mol_type = other DNA
tttttttaaggaaaccaaat

SEQ ID NO: 13023 - DNA, 20 bp, synthetic construct
  misc_feature 1..20: note = Description of Artificial Sequence: Synthetic oligonucleotide
  misc_feature 1..20: note = Target: ANGPTL3; (-) strand; PAM type: YTN; PAM sequence: TTT
  source 1..20: mol_type = other DNA
ttttttttaaggaaaccaaa

SEQ ID NO: 13024 - DNA, 20 bp, synthetic construct
  misc_feature 1..20: note = Description of Artificial Sequence: Synthetic oligonucleotide
  misc_feature 1..20: note = Target: ANGPTL3; (-) strand; PAM type: YTN; PAM sequence: TTT
  source 1..20: mol_type = other DNA
tttttttttaaggaaaccaa

SEQ ID NO: 13025 - DNA, 20 bp, synthetic construct
  misc_feature 1..20: note = Description of Artificial Sequence: Synthetic oligonucleotide
  misc_feature 1..20: note = Target: ANGPTL3; (-) strand; PAM type: YTN; PAM sequence: TTT
  source 1..20: mol_type = other DNA
ttttttttttaaggaaacca

SEQ ID NO: 13026 - DNA, 20 bp, synthetic construct
  misc_feature 1..20: note = Description of Artificial Sequence: Synthetic oligonucleotide
  misc_feature 1..20: note = Target: ANGPTL3; (-) strand; PAM type: YTN; PAM sequence: TTT
  source 1..20: mol_type = other DNA
tttttttttttaaggaaacc

SEQ ID NO: 13027 - DNA, 20 bp, synthetic construct
  misc_feature 1..20: note = Description of Artificial Sequence: Synthetic oligonucleotide
  misc_feature 1..20: note = Target: ANGPTL3; (-) strand; PAM type: YTN; PAM sequence: CTA
  source 1..20: mol_type = other DNA
tgagagtttttttttttttt

SEQ ID NO: 13028 - DNA, 20 bp, synthetic construct
  misc_feature 1..20: note = Description of Artificial Sequence: Synthetic oligonucleotide
  misc_feature 1..20: note = Target: ANGPTL3; (-) strand; PAM type: YTN; PAM sequence: CTG
  source 1..20: mol_type = other DNA
aaaggaacaaaatgaaacat

SEQ ID NO: 13029 - DNA, 20 bp, synthetic construct
  misc_feature 1..20: note = Description of Artificial Sequence: Synthetic oligonucleotide
  misc_feature 1..20: note = Target: ANGPTL3; (-) strand; PAM type: YTN; PAM sequence: CTC
  source 1..20: mol_type = other DNA
ctgaaaggaacaaaatgaaa

SEQ ID NO: 13030 - DNA, 20 bp, synthetic construct
  misc_feature 1..20: note = Description of Artificial Sequence: Synthetic oligonucleotide
  misc_feature 1..20: note = Target: ANGPTL3; (-) strand; PAM type: YTN; PAM sequence: CTA
  source 1..20: mol_type = other DNA
ctcctgaaaggaacaaaatg

SEQ ID NO: 13031 - DNA, 20 bp, synthetic construct
  misc_feature 1..20: note = Description of Artificial Sequence: Synthetic oligonucleotide
  misc_feature 1..20: note = Target: ANGPTL3; (-) strand; PAM type: YTN; PAM sequence: TTA
  source 1..20: mol_type = other DNA
ctactcctgaaaggaacaaa

SEQ ID NO: 13032 - DNA, 20 bp, synthetic construct
  misc_feature 1..20: note = Description of Artificial Sequence: Synthetic oligonucleotide
  misc_feature 1..20: note = Target: ANGPTL3; (-) strand; PAM type: YTN; PAM sequence: TTT
  source 1..20: mol_type = other DNA
actactcctgaaaggaacaa

SEQ ID NO: 13033 - DNA, 20 bp, synthetic construct
  misc_feature 1..20: note = Description of Artificial Sequence: Synthetic oligonucleotide
  misc_feature 1..20: note = Target: ANGPTL3; (-) strand; PAM type: YTN; PAM sequence: CTA
  source 1..20: mol_type = other DNA
atttactactcctgaaagga

SEQ ID NO: 13034 - DNA, 20 bp, synthetic construct
  misc_feature 1..20: note = Description of Artificial Sequence: Synthetic oligonucleotide
  misc_feature 1..20: note = Target: ANGPTL3; (-) strand; PAM type: YTN; PAM sequence: TTA
  source 1..20: mol_type = other DNA
tatggggaaaacgtctaatt

SEQ ID NO: 13035 - DNA, 20 bp, synthetic construct
  misc_feature 1..20: note = Description of Artificial Sequence: Synthetic oligonucleotide
  misc_feature 1..20: note = Target: ANGPTL3; (-) strand; PAM type: YTN; PAM sequence: TTT
  source 1..20: mol_type = other DNA
atatggggaaaacgtctaat

SEQ ID NO: 13036 - DNA, 20 bp, synthetic construct
  misc_feature 1..20: note = Description of Artificial Sequence: Synthetic oligonucleotide
  misc_feature 1..20: note = Target: ANGPTL3; (-) strand; PAM type: YTN; PAM sequence: CTT
  source 1..20: mol_type = other DNA
tatatggggaaaacgtctaa

SEQ ID NO: 13037 - DNA, 20 bp, synthetic construct
  misc_feature 1..20: note = Description of Artificial Sequence: Synthetic oligonucleotide
  misc_feature 1..20: note = Target: ANGPTL3; (-) strand; PAM type: YTN; PAM sequence: CTG
  source 1..20: mol_type = other DNA
gtagaaaaaagctttatatg

SEQ ID NO: 13038 - DNA, 20 bp, synthetic construct
  misc_feature 1..20: note = Description of Artificial Sequence: Synthetic oligonucleotide
  misc_feature 1..20: note = Target: ANGPTL3; (-) strand; PAM type: YTN; PAM sequence: TTC
  source 1..20: mol_type = other DNA
tggtagaaaaaagctttata

SEQ ID NO: 13039 - DNA, 20 bp, synthetic construct
  misc_feature 1..20: note = Description of Artificial Sequence: Synthetic oligonucleotide
  misc_feature 1..20: note = Target: ANGPTL3; (-) strand; PAM type: YTN; PAM sequence: TTT
  source 1..20: mol_type = other DNA
ctggtagaaaaaagctttat

SEQ ID NO: 13040 - DNA, 20 bp, synthetic construct
  misc_feature 1..20: note = Description of Artificial Sequence: Synthetic oligonucleotide
  misc_feature 1..20: note = Target: ANGPTL3; (-) strand; PAM type: YTN; PAM sequence: CTT
  source 1..20: mol_type = other DNA
tctggtagaaaaaagcttta

SEQ ID NO: 13041 - DNA, 20 bp, synthetic construct
  misc_feature 1..20: note = Description of Artificial Sequence: Synthetic oligonucleotide
  misc_feature 1..20: note = Target: ANGPTL3; (-) strand; PAM type: YTN; PAM sequence: CTA
  source 1..20: mol_type = other DNA
ccagaagtatctttctggta

SEQ ID NO: 13042 - DNA, 20 bp, synthetic construct
  misc_feature 1..20: note = Description of Artificial Sequence: Synthetic oligonucleotide
  misc_feature 1..20: note = Target: ANGPTL3; (-) strand; PAM type: YTN; PAM sequence: TTC
  source 1..20: mol_type = other DNA
taccagaagtatctttctgg

SEQ ID NO: 13043 - DNA, 20 bp, synthetic construct
  misc_feature 1..20: note = Description of Artificial Sequence: Synthetic oligonucleotide
  misc_feature 1..20: note = Target: ANGPTL3; (-) strand; PAM type: YTN; PAM sequence: CTT
  source 1..20: mol_type = other DNA
ctaccagaagtatctttctg

SEQ ID NO: 13044 - DNA, 20 bp, synthetic construct
  misc_feature 1..20: note = Description of Artificial Sequence: Synthetic oligonucleotide
  misc_feature 1..20: note = Target: ANGPTL3; (-) strand; PAM type: YTN; PAM sequence: TTC
  source 1..20: mol_type = other DNA
ttctaccagaagtatctttc

SEQ ID NO: 13045 - DNA, 20 bp, synthetic construct
  misc_feature 1..20: note = Description of Artificial Sequence: Synthetic oligonucleotide
  misc_feature 1..20: note = Target: ANGPTL3; (-) strand; PAM type: YTN; PAM sequence: CTT
  source 1..20: mol_type = other DNA
cttctaccagaagtatcttt

SEQ ID NO: 13046 - DNA, 20 bp, synthetic construct
  misc_feature 1..20: note = Description of Artificial Sequence: Synthetic oligonucleotide
  misc_feature 1..20: note = Target: ANGPTL3; (-) strand; PAM type: YTN; PAM sequence: CTC
  source 1..20: mol_type = other DNA
ttcttctaccagaagtatct

SEQ ID NO: 13047 - DNA, 20 bp, synthetic construct
  misc_feature 1..20: note = Description of Artificial Sequence: Synthetic oligonucleotide
  misc_feature 1..20: note = Target: ANGPTL3; (-) strand; PAM type: YTN; PAM sequence: TTC
  source 1..20: mol_type = other DNA
tcttcttctaccagaagtat

SEQ ID NO: 13048 - DNA, 20 bp, synthetic construct
  misc_feature 1..20: note = Description of Artificial Sequence: Synthetic oligonucleotide
  misc_feature 1..20: note = Target: ANGPTL3; (-) strand; PAM type: YTN; PAM sequence: TTT
  source 1..20: mol_type = other DNA
ctcttcttctaccagaagta

SEQ ID NO: 13049 - DNA, 20 bp, synthetic construct
  misc_feature 1..20: note = Description of Artificial Sequence: Synthetic oligonucleotide
  misc_feature 1..20: note = Target: ANGPTL3; (-) strand; PAM type: YTN; PAM sequence: CTT
  source 1..20: mol_type = other DNA
tctcttcttctaccagaagt

SEQ ID NO: 13050 - DNA, 20 bp, synthetic construct
  misc_feature 1..20: note = Description of Artificial Sequence: Synthetic oligonucleotide
  misc_feature 1..20: note = Target: ANGPTL3; (-) strand; PAM type: YTN; PAM sequence: CTC
  source 1..20: mol_type = other DNA
ctttctcttcttctaccaga

SEQ ID NO: 13051 - DNA, 20 bp, synthetic construct
  misc_feature 1..20: note = Description of Artificial Sequence: Synthetic oligonucleotide
  misc_feature 1..20: note = Target: ANGPTL3; (-) strand; PAM type: YTN; PAM sequence: TTA
  source 1..20: mol_type = other DNA
ggacaggagacagtcgtgtg

SEQ ID NO: 13052 - DNA, 20 bp, synthetic construct
  misc_feature 1..20: note = Description of Artificial Sequence: Synthetic oligonucleotide
  misc_feature 1..20: note = Target: ANGPTL3; (-) strand; PAM type: YTN; PAM sequence: TTA
  source 1..20: mol_type = other DNA
agcaaagtagttaggacagg

SEQ ID NO: 13053 - DNA, 20 bp, synthetic construct
  misc_feature 1..20: note = Description of Artificial Sequence: Synthetic oligonucleotide
  misc_feature 1..20: note = Target: ANGPTL3; (-) strand; PAM type: YTN; PAM sequence: TTT
  source 1..20: mol_type = other DNA
aagcaaagtagttaggacag

SEQ ID NO: 13054 - DNA, 20 bp, synthetic construct
  misc_feature 1..20: note = Description of Artificial Sequence: Synthetic oligonucleotide
  misc_feature 1..20: note = Target: ANGPTL3; (-) strand; PAM type: YTN; PAM sequence: CTT
  source 1..20: mol_type = other DNA
taagcaaagtagttaggaca

SEQ ID NO: 13055 - DNA, 20 bp, synthetic construct
  misc_feature 1..20: note = Description of Artificial Sequence: Synthetic oligonucleotide
  misc_feature 1..20: note = Target: ANGPTL3; (-) strand; PAM type: YTN; PAM sequence: TTG
  source 1..20: mol_type = other DNA
agcactttaagcaaagtagt

SEQ ID NO: 13056 - DNA, 20 bp, synthetic construct
  misc_feature 1..20: note = Description of Artificial Sequence: Synthetic oligonucleotide
  misc_feature 1..20: note = Target: ANGPTL3; (-) strand; PAM type: YTN; PAM sequence: TTT
  source 1..20: mol_type = other DNA
gagcactttaagcaaagtag

SEQ ID NO: 13057 - DNA, 20 bp, synthetic construct
  misc_feature 1..20: note = Description of Artificial Sequence: Synthetic oligonucleotide
  misc_feature 1..20: note = Target: ANGPTL3; (-) strand; PAM type: YTN; PAM sequence: CTG
  source 1..20: mol_type = other DNA
tgagtagtgatggaatttga

SEQ ID NO: 13058 - DNA, 20 bp, synthetic construct
  misc_feature 1..20: note = Description of Artificial Sequence: Synthetic oligonucleotide
  misc_feature 1..20: note = Target: ANGPTL3; (-) strand; PAM type: YTN; PAM sequence: TTA
  source 1..20: mol_type = other DNA
gacaactgtgagtagtgatg

SEQ ID NO: 13059 - DNA, 20 bp, synthetic construct
  misc_feature 1..20: note = Description of Artificial Sequence: Synthetic oligonucleotide
  misc_feature 1..20: note = Target: ANGPTL3; (-) strand; PAM type: YTN; PAM sequence: TTA
  source 1..20: mol_type = other DNA
gattagacaactgtgagtag

SEQ ID NO: 13060 - DNA, 20 bp, synthetic construct
  misc_feature 1..20: note = Description of Artificial Sequence: Synthetic oligonucleotide
  misc_feature 1..20: note = Target: ANGPTL3; (-) strand; PAM type: YTN; PAM sequence: CTT
  source 1..20: mol_type = other DNA
agattagacaactgtgagta

SEQ ID NO: 13061 - DNA, 20 bp, synthetic construct
  misc_feature 1..20: note = Description of Artificial Sequence: Synthetic oligonucleotide
  misc_feature 1..20: note = Target: ANGPTL3; (-) strand; PAM type: YTN; PAM sequence: TTA
  source 1..20: mol_type = other DNA
gacttagattagacaactgt

SEQ ID NO: 13062 - DNA, 20 bp, synthetic construct
  misc_feature 1..20: note = Description of Artificial Sequence: Synthetic oligonucleotide
  misc_feature 1..20: note = Target: ANGPTL3; (-) strand; PAM type: YTN; PAM sequence: CTG
  source 1..20: mol_type = other DNA
agagatcaaaggggattaga

SEQ ID NO: 13063 - DNA, 20 bp, synthetic construct
  misc_feature 1..20: note = Description of Artificial Sequence: Synthetic oligonucleotide
  misc_feature 1..20: note = Target: ANGPTL3; (-) strand; PAM type: YTN; PAM sequence: TTA
  source 1..20: mol_type = other DNA
agtagtagagagataaaagg

SEQ ID NO: 13064 - DNA, 20 bp, synthetic construct
  misc_feature 1..20: note = Description of Artificial Sequence: Synthetic oligonucleotide
  misc_feature 1..20: note = Target: ANGPTL3; (-) strand; PAM type: YTN; PAM sequence: TTA
  source 1..20: mol_type = other DNA
ttaagtagtagagagataaa

SEQ ID NO: 13065 - DNA, 20 bp, synthetic construct
  misc_feature 1..20: note = Description of Artificial Sequence: Synthetic oligonucleotide
  misc_feature 1..20: note = Target: ANGPTL3; (-) strand; PAM type: YTN; PAM sequence: TTA
  source 1..20: mol_type = other DNA
ttattaagtagtagagagat

SEQ ID NO: 13066 - DNA, 20 bp, synthetic construct
  misc_feature 1..20: note = Description of Artificial Sequence: Synthetic oligonucleotide
  misc_feature 1..20: note = Target: ANGPTL3; (-) strand; PAM type: YTN; PAM sequence: CTT
  source 1..20: mol_type = other DNA
attattaagtagtagagaga

SEQ ID NO: 13067 - DNA, 20 bp, synthetic construct
  misc_feature 1..20: note = Description of Artificial Sequence: Synthetic oligonucleotide
  misc_feature 1..20: note = Target: ANGPTL3; (-) strand; PAM type: YTN; PAM sequence: TTC
  source 1..20: mol_type = other DNA
ttattattaagtagtagaga

SEQ ID NO: 13068 - DNA, 20 bp, synthetic construct
  misc_feature 1..20: note = Description of Artificial Sequence: Synthetic oligonucleotide
  misc_feature 1..20: note = Target: ANGPTL3; (-) strand; PAM type: YTN; PAM sequence: TTG
  source 1..20: mol_type = other DNA
aaaaaaagatattcttatta

SEQ ID NO: 13069 - DNA, 20 bp, synthetic construct
  misc_feature 1..20: note = Description of Artificial Sequence: Synthetic oligonucleotide
  misc_feature 1..20: note = Target: ANGPTL3; (-) strand; PAM type: YTN; PAM sequence: TTT
  source 1..20: mol_type = other DNA
gaaaaaaagatattcttatt

SEQ ID NO: 13070 - DNA, 20 bp, synthetic construct
  misc_feature 1..20: note = Description of Artificial Sequence: Synthetic oligonucleotide
  misc_feature 1..20: note = Target: ANGPTL3; (-) strand; PAM type: YTN; PAM sequence: TTG
  source 1..20: mol_type = other DNA
tgaaagcaaaatgaaggtca

SEQ ID NO: 13071 - DNA, 20 bp, synthetic construct
  misc_feature 1..20: note = Description of Artificial Sequence: Synthetic oligonucleotide
  misc_feature 1..20: note = Target: ANGPTL3; (-) strand; PAM type: YTN; PAM sequence: TTC
  source 1..20: mol_type = other DNA
agataagggataatccatgg

SEQ ID NO: 13072 - DNA, 20 bp, synthetic construct
  misc_feature 1..20: note = Description of Artificial Sequence: Synthetic oligonucleotide
  misc_feature 1..20: note = Target: ANGPTL3; (-) strand; PAM type: YTN; PAM sequence: TTA
  source 1..20: mol_type = other DNA
taaagatggattcagataag

SEQ ID NO: 13073 - DNA, 20 bp, synthetic construct
  misc_feature 1..20: note = Description of Artificial Sequence: Synthetic oligonucleotide
  misc_feature 1..20: note = Target: ANGPTL3; (-) strand; PAM type: YTN; PAM sequence: CTA
  source 1..20: mol_type = other DNA
aatatgagaaaggaataggg

SEQ ID NO: 13074 - DNA, 20 bp, synthetic construct
  misc_feature 1..20: note = Description of Artificial Sequence: Synthetic oligonucleotide
  misc_feature 1..20: note = Target: ANGPTL3; (-) strand; PAM type: YTN; PAM sequence: TTG
  source 1..20: mol_type = other DNA
gcccacagtactaaatatga

SEQ ID NO: 13075 - DNA, 20 bp, synthetic construct
  misc_feature 1..20: note = Description of Artificial Sequence: Synthetic oligonucleotide
  misc_feature 1..20: note = Target: ANGPTL3; (-) strand; PAM type: YTN; PAM sequence: TTG
  source 1..20: mol_type = other DNA
tccattggcccacagtacta

SEQ ID NO: 13076 - DNA, 20 bp, synthetic construct
  misc_feature 1..20: note = Description of Artificial Sequence: Synthetic oligonucleotide
  misc_feature 1..20: note = Target: ANGPTL3; (-) strand; PAM type: YTN; PAM sequence: TTG
  source 1..20: mol_type = other DNA
aaggttgtccattggcccac

SEQ ID NO: 13077 - DNA, 20 bp, synthetic construct
  misc_feature 1..20: note = Description of Artificial Sequence: Synthetic oligonucleotide
  misc_feature 1..20: note = Target: ANGPTL3; (-) strand; PAM type: YTN; PAM sequence: CTG
  source 1..20: mol_type = other DNA
agggtcagtgtagaaaagat

SEQ ID NO: 13078 - DNA, 20 bp, synthetic construct
  misc_feature 1..20: note = Description of Artificial Sequence: Synthetic oligonucleotide
  misc_feature 1..20: note = Target: ANGPTL3; (-) strand; PAM type: YTN; PAM sequence: TTC
  source 1..20: mol_type = other DNA
atggtaaataaaggagtccg

SEQ ID NO: 13079 - DNA, 20 bp, synthetic construct
  misc_feature 1..20: note = Description of Artificial Sequence: Synthetic oligonucleotide
  misc_feature 1..20: note = Target: ANGPTL3; (-) strand; PAM type: YTN; PAM sequence: TTA
  source 1..20: mol_type = other DNA
ttcatggtaaataaaggagt

SEQ ID NO: 13080 - DNA, 20 bp, synthetic construct
  misc_feature 1..20: note = Description of Artificial Sequence: Synthetic oligonucleotide
  misc_feature 1..20: note = Target: ANGPTL3; (-) strand; PAM type: YTN; PAM sequence: TTT
  source 1..20: mol_type = other DNA
attcatggtaaataaaggag

SEQ ID NO: 13081 - DNA, 20 bp, synthetic construct
  misc_feature 1..20: note = Description of Artificial Sequence: Synthetic oligonucleotide
  misc_feature 1..20: note = Target: ANGPTL3; (-) strand; PAM type: YTN; PAM sequence: CTT
  source 1..20: mol_type = other DNA
tattcatggtaaataaagga

SEQ ID NO: 13082 - DNA, 20 bp, synthetic construct
  misc_feature 1..20: note = Description of Artificial Sequence: Synthetic oligonucleotide
  misc_feature 1..20: note = Target: ANGPTL3; (-) strand; PAM type: YTN; PAM sequence: TTG
  source 1..20: mol_type = other DNA
gaactttattcatggtaaat

SEQ ID NO: 13083 - DNA, 20 bp, synthetic construct
  misc_feature 1..20: note = Description of Artificial Sequence: Synthetic oligonucleotide
  misc_feature 1..20: note = Target: ANGPTL3; (-) strand; PAM type: YTN; PAM sequence: TTT
  source 1..20: mol_type = other DNA
ggaactttattcatggtaaa

SEQ ID NO: 13084 - DNA, 20 bp, synthetic construct
  misc_feature 1..20: note = Description of Artificial Sequence: Synthetic oligonucleotide
  misc_feature 1..20: note = Target: ANGPTL3; (-) strand; PAM type: YTN; PAM sequence: TTT
  source 1..20: mol_type = other DNA
tggaactttattcatggtaa

SEQ ID NO: 13085 - DNA, 20 bp, synthetic construct
  misc_feature 1..20: note = Description of Artificial Sequence: Synthetic oligonucleotide
  misc_feature 1..20: note = Target: ANGPTL3; (-) strand; PAM type: YTN; PAM sequence: TTG
  source 1..20: mol_type = other DNA
ggatgaatatgtagattttg

SEQ ID NO: 13086 - DNA, 20 bp, synthetic construct
  misc_feature 1..20: note = Description of Artificial Sequence: Synthetic oligonucleotide
  misc_feature 1..20: note = Target: ANGPTL3; (-) strand; PAM type: YTN; PAM sequence: CTT
  source 1..20: mol_type = other DNA
gggatgaatatgtagatttt

SEQ ID NO: 13087 - DNA, 20 bp, synthetic construct
  misc_feature 1..20: note = Description of Artificial Sequence: Synthetic oligonucleotide
  misc_feature 1..20: note = Target: ANGPTL3; (-) strand; PAM type: YTN; PAM sequence: CTG
  source 1..20: mol_type = other DNA
gaaagagacttgggatgaat

SEQ ID NO: 13088 - DNA, 20 bp, synthetic construct
  misc_feature 1..20: note = Description of Artificial Sequence: Synthetic oligonucleotide
  misc_feature 1..20: note = Target: ANGPTL3; (-) strand; PAM type: YTN; PAM sequence: TTG
  source 1..20: mol_type = other DNA
aagggagaaatggcaaatag

SEQ ID NO: 13089 - DNA, 20 bp, synthetic construct
  misc_feature 1..20: note = Description of Artificial Sequence: Synthetic oligonucleotide
  misc_feature 1..20: note = Target: ANGPTL3; (-) strand; PAM type: YTN; PAM sequence: TTG
  source 1..20: mol_type = other DNA
agtgaagtatagggtattga

SEQ ID NO: 13090 - DNA, 20 bp, synthetic construct
  misc_feature 1..20: note = Description of Artificial Sequence: Synthetic oligonucleotide
  misc_feature 1..20: note = Target: ANGPTL3; (-) strand; PAM type: YTN; PAM sequence: TTT
  source 1..20: mol_type = other DNA
gagtgaagtatagggtattg

SEQ ID NO: 13091 - DNA, 20 bp, synthetic construct
  misc_feature 1..20: note = Description of Artificial Sequence: Synthetic oligonucleotide
  misc_feature 1..20: note = Target: ANGPTL3; (-) strand; PAM type: YTN; PAM sequence: TTG
  source 1..20: mol_type = other DNA
aatttgagtgaagtataggg

SEQ ID NO: 13092 - DNA, 20 bp, synthetic construct
  misc_feature 1..20: note = Description of Artificial Sequence: Synthetic oligonucleotide
  misc_feature 1..20: note = Target: ANGPTL3; (-) strand; PAM type: YTN; PAM sequence: TTG
  source 1..20: mol_type = other DNA
gtatgttgaatttgagtgaa

SEQ ID NO: 13093 - DNA, 20 bp, synthetic construct
  misc_feature 1..20: note = Description of Artificial Sequence: Synthetic oligonucleotide
  misc_feature 1..20: note = Target: ANGPTL3; (-) strand; PAM type: YTN; PAM sequence: TTT
  source 1..20: mol_type = other DNA
ggtatgttgaatttgagtga

SEQ ID NO: 13094 - DNA, 20 bp, synthetic construct
  misc_feature 1..20: note = Description of Artificial Sequence: Synthetic oligonucleotide
  misc_feature 1..20: note = Target: ANGPTL3; (-) strand; PAM type: YTN; PAM sequence: TTT
  source 1..20: mol_type = other DNA
tggtatgttgaatttgagtg

SEQ ID NO: 13095 - DNA, 20 bp, synthetic construct
  misc_feature 1..20: note = Description of Artificial Sequence: Synthetic oligonucleotide
  misc_feature 1..20: note = Target: ANGPTL3; (-) strand; PAM type: YTN; PAM sequence: TTT
  source 1..20: mol_type = other DNA
ttggtatgttgaatttgagt

SEQ ID NO: 13096 - DNA, 20 bp, synthetic construct
  misc_feature 1..20: note = Description of Artificial Sequence: Synthetic oligonucleotide
  misc_feature 1..20: note = Target: ANGPTL3; (-) strand; PAM type: YTN; PAM sequence: TTA
  source 1..20: mol_type = other DNA
tttttggtatgttgaatttg

SEQ ID NO: 13097 - DNA, 20 bp, synthetic construct
  misc_feature 1..20: note = Description of Artificial Sequence: Synthetic oligonucleotide
  misc_feature 1..20: note = Target: ANGPTL3; (-) strand; PAM type: YTN; PAM sequence: TTT
  source 1..20: mol_type = other DNA
atttttggtatgttgaattt

SEQ ID NO: 13098 - DNA, 20 bp, synthetic construct
  misc_feature 1..20: note = Description of Artificial Sequence: Synthetic oligonucleotide
  misc_feature 1..20: note = Target: ANGPTL3; (-) strand; PAM type: YTN; PAM sequence: TTT
  source 1..20: mol_type = other DNA
tatttttggtatgttgaatt

SEQ ID NO: 13099 - DNA, 20 bp, synthetic construct
  misc_feature 1..20: note = Description of Artificial Sequence: Synthetic oligonucleotide
  misc_feature 1..20: note = Target: ANGPTL3; (-) strand; PAM type: YTN; PAM sequence: CTT
  source 1..20: mol_type = other DNA
ttatttttggtatgttgaat

SEQ ID NO: 13100 - DNA, 20 bp, synthetic construct
  misc_feature 1..20: note = Description of Artificial Sequence: Synthetic oligonucleotide
  misc_feature 1..20: note = Target: ANGPTL3; (-) strand; PAM type: YTN; PAM sequence: CTG
  source 1..20: mol_type = other DNA
gccttttatttttggtatgt

SEQ ID NO: 13101 - DNA, 20 bp, synthetic construct
  misc_feature 1..20: note = Description of Artificial Sequence: Synthetic oligonucleotide
  misc_feature 1..20: note = Target: ANGPTL3; (-) strand; PAM type: YTN; PAM sequence: TTA
  source 1..20: mol_type = other DNA
caggtgtgagccaccgtgcc

SEQ ID NO: 13102 - DNA, 20 bp, synthetic construct
  misc_feature 1..20: note = Description of Artificial Sequence: Synthetic oligonucleotide
  misc_feature 1..20: note = Target: ANGPTL3; (-) strand; PAM type: YTN; PAM sequence: CTG
  source 1..20: mol_type = other DNA
ggattacaggtgtgagccac

SEQ ID NO: 13103 - DNA, 20 bp, synthetic construct
  misc_feature 1..20: note = Description of Artificial Sequence: Synthetic oligonucleotide
  misc_feature 1..20: note = Target: ANGPTL3; (-) strand; PAM type: YTN; PAM sequence: CTC
  source 1..20: mol_type = other DNA
ccaaagtcctgggattacag

SEQ ID NO: 13104 - DNA, 20 bp, synthetic construct
  misc_feature 1..20: note = Description of Artificial Sequence: Synthetic oligonucleotide
  misc_feature 1..20: note = Target: ANGPTL3; (-) strand; PAM type: YTN; PAM sequence: CTC
  source 1..20: mol_type = other DNA
agcctcccaaagtcctggga

SEQ ID NO: 13105 - DNA, 20 bp, synthetic construct
  misc_feature 1..20: note = Description of Artificial Sequence: Synthetic oligonucleotide
  misc_feature 1..20: note = Target: ANGPTL3; (-) strand; PAM type: YTN; PAM sequence: CTG
  source 1..20: mol_type = other DNA
cctcagcctcccaaagtcct

SEQ ID NO: 13106 - DNA, 20 bp, synthetic construct
  misc_feature 1..20: note = Description of Artificial Sequence: Synthetic oligonucleotide
  misc_feature 1..20: note = Target: ANGPTL3; (-) strand; PAM type: YTN; PAM sequence: CTC
  source 1..20: mol_type = other DNA
aggtgatccacctgcctcag

SEQ ID NO: 13107 - DNA, 20 bp, synthetic construct
  misc_feature 1..20: note = Description of Artificial Sequence: Synthetic oligonucleotide
  misc_feature 1..20: note = Target: ANGPTL3; (-) strand; PAM type: YTN; PAM sequence: CTG
  source 1..20: mol_type = other DNA
acctcaggtgatccacctgc

SEQ ID NO: 13108 - DNA, 20 bp, synthetic construct
  misc_feature 1..20: note = Description of Artificial Sequence: Synthetic oligonucleotide
  misc_feature 1..20: note = Target: ANGPTL3; (-) strand; PAM type: YTN; PAM sequence: CTC
  source 1..20: mol_type = other DNA
ctgacctcaggtgatccacc

SEQ ID NO: 13109 - DNA, 20 bp, synthetic construct
  misc_feature 1..20: note = Description of Artificial Sequence: Synthetic oligonucleotide
  misc_feature 1..20: note = Target: ANGPTL3; (-) strand; PAM type: YTN; PAM sequence: CTG
  source 1..20: mol_type = other DNA
gtcagactcctgacctcagg

SEQ ID NO: 13110 - DNA, 20 bp, synthetic construct
  misc_feature 1..20: note = Description of Artificial Sequence: Synthetic oligonucleotide
  misc_feature 1..20: note = Target: ANGPTL3; (-) strand; PAM type: YTN; PAM sequence: TTG
  source 1..20: mol_type = other DNA
gtcaggctggtcagactcct

SEQ ID NO: 13111 - DNA, 20 bp, synthetic construct
  misc_feature 1..20: note = Description of Artificial Sequence: Synthetic oligonucleotide
  misc_feature 1..20: note = Target: ANGPTL3; (-) strand; PAM type: YTN; PAM sequence: TTC
  source 1..20: mol_type = other DNA
accatattggtcaggctggt

SEQ ID NO: 13112 - DNA, 20 bp, synthetic construct
  misc_feature 1..20: note = Description of Artificial Sequence: Synthetic oligonucleotide
  misc_feature 1..20: note = Target: ANGPTL3; (-) strand; PAM type: YTN; PAM sequence: TTT
  source 1..20: mol_type = other DNA
caccatattggtcaggctgg

SEQ ID NO: 13113 - DNA, 20 bp, synthetic construct
  misc_feature 1..20: note = Description of Artificial Sequence: Synthetic oligonucleotide
  misc_feature 1..20: note = Target: ANGPTL3; (-) strand; PAM type: YTN; PAM sequence: TTA
  source 1..20: mol_type = other DNA
ggtagagacggggtttcacc

SEQ ID NO: 13114 - DNA, 20 bp, synthetic construct
  misc_feature 1..20: note = Description of Artificial Sequence: Synthetic oligonucleotide
  misc_feature 1..20: note = Target: ANGPTL3; (-) strand; PAM type: YTN; PAM sequence: TTT
  source 1..20: mol_type = other DNA
aggtagagacggggtttcac

SEQ ID NO: 13115 - DNA, 20 bp, synthetic construct
  misc_feature 1..20: note = Description of Artificial Sequence: Synthetic oligonucleotide
  misc_feature 1..20: note = Target: ANGPTL3; (-) strand; PAM type: YTN; PAM sequence: TTT
  source 1..20: mol_type = other DNA
taggtagagacggggtttca

SEQ ID NO: 13116 - DNA, 20 bp, synthetic construct
  misc_feature 1..20: note = Description of Artificial Sequence: Synthetic oligonucleotide
  misc_feature 1..20: note = Target: ANGPTL3; (-) strand; PAM type: YTN; PAM sequence: TTG
  source 1..20: mol_type = other DNA
tattttaggtagagacgggg

SEQ ID NO: 13117 - DNA, 20 bp, synthetic construct
  misc_feature 1..20: note = Description of Artificial Sequence: Synthetic oligonucleotide
  misc_feature 1..20: note = Target: ANGPTL3; (-) strand; PAM type: YTN; PAM sequence: TTT
  source 1..20: mol_type = other DNA
gtattttaggtagagacggg

SEQ ID NO: 13118 - DNA, 20 bp, synthetic construct
  misc_feature 1..20: note = Description of Artificial Sequence: Synthetic oligonucleotide
  misc_feature 1..20: note = Target: ANGPTL3; (-) strand; PAM type: YTN; PAM sequence: TTT
  source 1..20: mol_type = other DNA
tgtattttaggtagagacgg

SEQ ID NO: 13119 - DNA, 20 bp, synthetic construct
  misc_feature 1..20: note = Description of Artificial Sequence: Synthetic oligonucleotide
  misc_feature 1..20: note = Target: ANGPTL3; (-) strand; PAM type: YTN; PAM sequence: TTT
  source 1..20: mol_type = other DNA
ttgtattttaggtagagacg

SEQ ID NO: 13120 - DNA, 20 bp, synthetic construct
  misc_feature 1..20: note = Description of Artificial Sequence: Synthetic oligonucleotide
  misc_feature 1..20: note = Target: ANGPTL3; (-) strand; PAM type: YTN; PAM sequence: CTA
  source 1..20: mol_type = other DNA
atttttgtattttaggtaga

SEQ ID NO: 13121 - DNA, 20 bp, synthetic construct
  misc_feature 1..20: note = Description of Artificial Sequence: Synthetic oligonucleotide
  misc_feature 1..20: note = Target: ANGPTL3; (-) strand; PAM type: YTN; PAM sequence: CTG
  source 1..20: mol_type = other DNA
gctaatttttgtattttagg

SEQ ID NO: 13122 - DNA, 20 bp, synthetic construct
  misc_feature 1..20: note = Description of Artificial Sequence: Synthetic oligonucleotide
  misc_feature 1..20: note = Target: ANGPTL3; (-) strand; PAM type: YTN; PAM sequence: CTG
  source 1..20: mol_type = other DNA
taggcacatgccaccacgcc

SEQ ID NO: 13123 - DNA, 20 bp, synthetic construct
  misc_feature 1..20: note = Description of Artificial Sequence: Synthetic oligonucleotide
  misc_feature 1..20: note = Target: ANGPTL3; (-) strand; PAM type: YTN; PAM sequence: CTG
  source 1..20: mol_type = other DNA
ggactgtaggcacatgccac

SEQ ID NO: 13124 - DNA, 20 bp, synthetic construct
  misc_feature 1..20: note = Description of Artificial Sequence: Synthetic oligonucleotide
  misc_feature 1..20: note = Target: ANGPTL3; (-) strand; PAM type: YTN; PAM sequence: TTG
  source 1..20: mol_type = other DNA
agtagctgggactgtaggca

SEQ ID NO: 13125 - DNA, 20 bp, synthetic construct
  misc_feature 1..20: note = Description of Artificial Sequence: Synthetic oligonucleotide
  misc_feature 1..20: note = Target: ANGPTL3; (-) strand; PAM type: YTN; PAM sequence: CTT
  source 1..20: mol_type = other DNA
gagtagctgggactgtaggc

SEQ ID NO: 13126 - DNA, 20 bp, synthetic construct
  misc_feature 1..20: note = Description of Artificial Sequence: Synthetic oligonucleotide
  misc_feature 1..20: note = Target: ANGPTL3; (-) strand; PAM type: YTN; PAM sequence: CTC
  source 1..20: mol_type = other DNA
ttgagtagctgggactgtag

SEQ ID NO: 13127 - DNA, 20 bp, synthetic construct
  misc_feature 1..20: note = Description of Artificial Sequence: Synthetic oligonucleotide
  misc_feature 1..20: note = Target: ANGPTL3; (-) strand; PAM type: YTN; PAM sequence: CTC
  source 1..20: mol_type = other DNA
agcctcttgagtagctggga

SEQ ID NO: 13128 - DNA, 20 bp, synthetic construct
  misc_feature 1..20: note = Description of Artificial Sequence: Synthetic oligonucleotide
  misc_feature 1..20: note = Target: ANGPTL3; (-) strand; PAM type: YTN; PAM sequence: CTG
  source 1..20: mol_type = other DNA
tctcagcctcttgagtagct

SEQ ID NO: 13129 - DNA, 20 bp, synthetic construct
  misc_feature 1..20: note = Description of Artificial Sequence: Synthetic oligonucleotide
  misc_feature 1..20: note = Target: ANGPTL3; (-) strand; PAM type: YTN; PAM sequence: CTC
  source 1..20: mol_type = other DNA
ctgtctcagcctcttgagta

SEQ ID NO: 13130 - DNA, 20 bp, synthetic construct
  misc_feature 1..20: note = Description of Artificial Sequence: Synthetic oligonucleotide
  misc_feature 1..20: note = Target: ANGPTL3; (-) strand; PAM type: YTN; PAM sequence: TTC
  source 1..20: mol_type = other DNA
tcctgtctcagcctcttgag

SEQ ID NO: 13131 - DNA, 20 bp, synthetic construct
  misc_feature 1..20: note = Description of Artificial Sequence: Synthetic oligonucleotide
  misc_feature 1..20: note = Target: ANGPTL3; (-) strand; PAM type: YTN; PAM sequence: TTC
  source 1..20: mol_type = other DNA
aagcgattctcctgtctcag

SEQ ID NO: 13132 - DNA, 20 bp, synthetic construct
  misc_feature 1..20: note = Description of Artificial Sequence: Synthetic oligonucleotide
  misc_feature 1..20: note = Target: ANGPTL3; (-) strand; PAM type: YTN; PAM sequence: CTG
  source 1..20: mol_type = other DNA
ggttcaagcgattctcctgt

SEQ ID NO: 13133 - DNA, 20 bp, synthetic construct
  misc_feature 1..20: note = Description of Artificial Sequence: Synthetic oligonucleotide
  misc_feature 1..20: note = Target: ANGPTL3; (-) strand; PAM type: YTN; PAM sequence: CTC
  source 1..20: mol_type = other DNA
ctgggttcaagcgattctcc

SEQ ID NO: 13134 - DNA, 20 bp, synthetic construct
  misc_feature 1..20: note = Description of Artificial Sequence: Synthetic oligonucleotide
  misc_feature 1..20: note = Target: ANGPTL3; (-) strand; PAM type: YTN; PAM sequence: CTC
  source 1..20: mol_type = other DNA
cgcctcctgggttcaagcga

SEQ ID NO: 13135 - DNA, 20 bp, synthetic construct
  misc_feature 1..20: note = Description of Artificial Sequence: Synthetic oligonucleotide
  misc_feature 1..20: note = Target: ANGPTL3; (-) strand; PAM type: YTN; PAM sequence: CTG
  source 1..20: mol_type = other DNA
caacctccgcctcctgggtt

SEQ ID NO: 13136 - DNA, 20 bp, synthetic construct
  misc_feature 1..20: note = Description of Artificial Sequence: Synthetic oligonucleotide
  misc_feature 1..20: note = Target: ANGPTL3; (-) strand; PAM type: YTN; PAM sequence: CTC
  source 1..20: mol_type = other DNA
actgcaacctccgcctcctg

SEQ ID NO: 13137 - DNA, 20 bp, synthetic construct
  misc_feature 1..20: note = Description of Artificial Sequence: Synthetic oligonucleotide
  misc_feature 1..20: note = Target: ANGPTL3; (-) strand; PAM type: YTN; PAM sequence: CTC
  source 1..20: mol_type = other DNA
agctcactgcaacctccgcc

SEQ ID NO: 13138 - DNA, 20 bp, synthetic construct
  misc_feature 1..20: note = Description of Artificial Sequence: Synthetic oligonucleotide
  misc_feature 1..20: note = Target: ANGPTL3; (-) strand; PAM type: YTN; PAM sequence: TTG
  source 1..20: mol_type = other DNA
gtgtgatctcagctcactgc

SEQ ID NO: 13139 - DNA, 20 bp, synthetic construct
  misc_feature 1..20: note = Description of Artificial Sequence: Synthetic oligonucleotide
  misc_feature 1..20: note = Target: ANGPTL3; (-) strand; PAM type: YTN; PAM sequence: CTG
  source 1..20: mol_type = other DNA
tcacccagtgcattggtgtg

SEQ ID NO: 13140 - DNA, 20 bp, synthetic construct
  misc_feature 1..20: note = Description of Artificial Sequence: Synthetic oligonucleotide
  misc_feature 1..20: note = Target: ANGPTL3; (-) strand; PAM type: YTN; PAM sequence: TTC
  source 1..20: mol_type = other DNA
tgtcacccagtgcattggtg

SEQ ID NO: 13141 - DNA, 20 bp, synthetic construct
  misc_feature 1..20: note = Description of Artificial Sequence: Synthetic oligonucleotide
  misc_feature 1..20: note = Target: ANGPTL3; (-) strand; PAM type: YTN; PAM sequence: TTG
  source 1..20: mol_type = other DNA
ttctgtcacccagtgcattg

SEQ ID NO: 13142 - DNA, 20 bp, synthetic construct
  misc_feature 1..20: note = Description of Artificial Sequence: Synthetic oligonucleotide
  misc_feature 1..20: note = Target: ANGPTL3; (-) strand; PAM type: YTN; PAM sequence: CTT
  source 1..20: mol_type = other DNA
gttctgtcacccagtgcatt

SEQ ID NO: 13143 - DNA, 20 bp, synthetic construct
  misc_feature 1..20: note = Description of Artificial Sequence: Synthetic oligonucleotide
  misc_feature 1..20: note = Target: ANGPTL3; (-) strand; PAM type: YTN; PAM sequence: TTG
  source 1..20: mol_type = other DNA
agtcagtcttgttctgtcac

SEQ ID NO: 13144 - DNA, 20 bp, synthetic construct
  misc_feature 1..20: note = Description of Artificial Sequence: Synthetic oligonucleotide
  misc_feature 1..20: note = Target: ANGPTL3; (-) strand; PAM type: YTN; PAM sequence: TTT
  source 1..20: mol_type = other DNA
gagtcagtcttgttctgtca

SEQ ID NO: 13145 - DNA, 20 bp, synthetic construct
  misc_feature 1..20: note = Description of Artificial Sequence: Synthetic oligonucleotide
  misc_feature 1..20: note = Target: ANGPTL3; (-) strand; PAM type: YTN; PAM sequence: TTT
  source 1..20: mol_type = other DNA
tgagtcagtcttgttctgtc

SEQ ID NO: 13146 - DNA, 20 bp, synthetic construct
  misc_feature 1..20: note = Description of Artificial Sequence: Synthetic oligonucleotide
  misc_feature 1..20: note = Target: ANGPTL3; (-) strand; PAM type: YTN; PAM sequence: TTT
  source 1..20: mol_type = other DNA
ttgagtcagtcttgttctgt

SEQ ID NO: 13147 - DNA, 20 bp, synthetic construct
  misc_feature 1..20: note = Description of Artificial Sequence: Synthetic oligonucleotide
  misc_feature 1..20: note = Target: ANGPTL3; (-) strand; PAM type: YTN; PAM sequence: TTT
  source 1..20: mol_type = other DNA
tttgagtcagtcttgttctg

SEQ ID NO: 13148 - DNA, 20 bp, synthetic construct
  misc_feature 1..20: note = Description of Artificial Sequence: Synthetic oligonucleotide
  misc_feature 1..20: note = Target: ANGPTL3; (-) strand; PAM type: YTN; PAM sequence: TTT
  source 1..20: mol_type = other DNA
ttttgagtcagtcttgttct

SEQ ID NO: 13149 - DNA, 20 bp, synthetic construct
  misc_feature 1..20: note = Description of Artificial Sequence: Synthetic oligonucleotide
  misc_feature 1..20: note = Target: ANGPTL3; (-) strand; PAM type: YTN; PAM sequence: TTT
  source 1..20: mol_type = other DNA
tttttgagtcagtcttgttc

SEQ ID NO: 13150 - DNA, 20 bp, synthetic construct
  misc_feature 1..20: note = Description of Artificial Sequence: Synthetic oligonucleotide
  misc_feature 1..20: note = Target: ANGPTL3; (-) strand; PAM type: YTN; PAM sequence: TTT
  source 1..20: mol_type = other DNA
ttttttgagtcagtcttgtt

SEQ ID NO: 13151 - DNA, 20 bp, synthetic construct
  misc_feature 1..20: note = Description of Artificial Sequence: Synthetic oligonucleotide
  misc_feature 1..20: note = Target: ANGPTL3; (-) strand; PAM type: YTN; PAM sequence: TTA
  source 1..20: mol_type = other DNA
tttttttttgagtcagtctt

SEQ ID NO: 13152 - DNA, 20 bp, synthetic construct
  misc_feature 1..20: note = Description of Artificial Sequence: Synthetic oligonucleotide
  misc_feature 1..20: note = Target: ANGPTL3; (-) strand; PAM type: YTN; PAM sequence: TTT
  source 1..20: mol_type = other DNA
atttttttttgagtcagtct

SEQ ID NO: 13153 - DNA, 20 bp, synthetic construct
  misc_feature 1..20: note = Description of Artificial Sequence: Synthetic oligonucleotide
  misc_feature 1..20: note = Target: ANGPTL3; (-) strand; PAM type: YTN; PAM sequence: TTA
  source 1..20: mol_type = other DNA
tttatttttttttgagtcag

SEQ ID NO: 13154 - DNA, 20 bp, synthetic construct
  misc_feature 1..20: note = Description of Artificial Sequence: Synthetic oligonucleotide
  misc_feature 1..20: note = Target: ANGPTL3; (-) strand; PAM type: YTN; PAM sequence: TTG
  source 1..20: mol_type = other DNA
ttatttatttttttttgagt

SEQ ID NO: 13155 - DNA, 20 bp, synthetic construct
  misc_feature 1..20: note = Description of Artificial Sequence: Synthetic oligonucleotide
  misc_feature 1..20: note = Target: ANGPTL3; (-) strand; PAM type: YTN; PAM sequence: TTT
  source 1..20: mol_type = other DNA
gttatttatttttttttgag

SEQ ID NO: 13156 - DNA, 20 bp, synthetic construct
  misc_feature 1..20: note = Description of Artificial Sequence: Synthetic oligonucleotide
  misc_feature 1..20: note = Target: ANGPTL3; (-) strand; PAM type: YTN; PAM sequence: CTG
  source 1..20: mol_type = other DNA
gggaatttgttatttatttt

SEQ ID NO: 13157 - DNA, 20 bp, synthetic construct
  misc_feature 1..20: note = Description of Artificial Sequence: Synthetic oligonucleotide
  misc_feature 1..20: note = Target: ANGPTL3; (-) strand; PAM type: YTN; PAM sequence: TTA
  source 1..20: mol_type = other DNA
atggatataaagaagtgagg

SEQ ID NO: 13158 - DNA, 20 bp, synthetic construct
  misc_feature 1..20: note = Description of Artificial Sequence: Synthetic oligonucleotide
  misc_feature 1..20: note = Target: ANGPTL3; (-) strand; PAM type: YTN; PAM sequence: CTG
  source 1..20: mol_type = other DNA
gtcatattaatggatataaa

SEQ ID NO: 13159 - DNA, 20 bp, synthetic construct
  misc_feature 1..20: note = Description of Artificial Sequence: Synthetic oligonucleotide
  misc_feature 1..20: note = Target: ANGPTL3; (-) strand; PAM type: YTN; PAM sequence: CTG
  source 1..20: mol_type = other DNA
ggaacatgctggtcatatta

SEQ ID NO: 13160 - DNA, 20 bp, synthetic construct
  misc_feature 1..20: note = Description of Artificial Sequence: Synthetic oligonucleotide
  misc_feature 1..20: note = Target: ANGPTL3; (-) strand; PAM type: YTN; PAM sequence: CTG
  source 1..20: mol_type = other DNA
tgactgggaacatgctggtc

SEQ ID NO: 13161 - DNA, 20 bp, synthetic construct
  misc_feature 1..20: note = Description of Artificial Sequence: Synthetic oligonucleotide
  misc_feature 1..20: note = Target: ANGPTL3; (-) strand; PAM type: YTN; PAM sequence: TTC
  source 1..20: mol_type = other DNA
tgtgactgggaacatgctgg

SEQ ID NO: 13162 - DNA, 20 bp, synthetic construct
  misc_feature 1..20: note = Description of Artificial Sequence: Synthetic oligonucleotide
  misc_feature 1..20: note = Target: ANGPTL3; (-) strand; PAM type: YTN; PAM sequence: CTT
  source 1..20: mol_type = other DNA
ctgtgactgggaacatgctg

SEQ ID NO: 13163 - DNA, 20 bp, synthetic construct
  misc_feature 1..20: note = Description of Artificial Sequence: Synthetic oligonucleotide
  misc_feature 1..20: note = Target: ANGPTL3; (-) strand; PAM type: YTN; PAM sequence: TTC
  source 1..20: mol_type = other DNA
caggcttctgtgactgggaa

SEQ ID NO: 13164 - DNA, 20 bp, synthetic construct
  misc_feature 1..20: note = Description of Artificial Sequence: Synthetic oligonucleotide
  misc_feature 1..20: note = Target: ANGPTL3; (-) strand; PAM type: YTN; PAM sequence: TTC
  source 1..20: mol_type = other DNA
cgggttccaggcttctgtga

SEQ ID NO: 13165 - DNA, 20 bp, synthetic construct
  misc_feature 1..20: note = Description of Artificial Sequence: Synthetic oligonucleotide
  misc_feature 1..20: note = Target: ANGPTL3; (-) strand; PAM type: YTN; PAM sequence: CTT
  source 1..20: mol_type = other DNA
ccgggttccaggcttctgtg

SEQ ID NO: 13166 - DNA, 20 bp, synthetic construct
  misc_feature 1..20: note = Description of Artificial Sequence: Synthetic oligonucleotide
  misc_feature 1..20: note = Target: ANGPTL3; (-) strand; PAM type: YTN; PAM sequence: TTG
  source 1..20: mol_type = other DNA
agtgaaaagccagagatgtc

SEQ ID NO: 13167 - DNA, 20 bp, synthetic construct
  misc_feature 1..20: note = Description of Artificial Sequence: Synthetic oligonucleotide
  misc_feature 1..20: note = Target: ANGPTL3; (-) strand; PAM type: YTN; PAM sequence: TTA
  source 1..20: mol_type = other DNA
caaagttgagtgaaaagcca

SEQ ID NO: 13168 - DNA, 20 bp, synthetic construct
  misc_feature 1..20: note = Description of Artificial Sequence: Synthetic oligonucleotide
  misc_feature 1..20: note = Target: ANGPTL3; (-) strand; PAM type: YTN; PAM sequence: TTT
  source 1..20: mol_type = other DNA
acaaagttgagtgaaaagcc

SEQ ID NO: 13169 - DNA, 20 bp, synthetic construct
  misc_feature 1..20: note = Description of Artificial Sequence: Synthetic oligonucleotide
  misc_feature 1..20: note = Target: ANGPTL3; (-) strand; PAM type: YTN; PAM sequence: TTA
  source 1..20: mol_type = other DNA
tgatacaaaagaggtagttt

SEQ ID NO: 13170 - DNA, 20 bp, synthetic construct
  misc_feature 1..20: note = Description of Artificial Sequence: Synthetic oligonucleotide
  misc_feature 1..20: note = Target: ANGPTL3; (-) strand; PAM type: YTN; PAM sequence: CTT
  source 1..20: mol_type = other DNA
atgatacaaaagaggtagtt

SEQ ID NO: 13171 - DNA, 20 bp, synthetic construct
  misc_feature 1..20: note = Description of Artificial Sequence: Synthetic oligonucleotide
  misc_feature 1..20: note = Target: ANGPTL3; (-) strand; PAM type: YTN; PAM sequence: TTG
  source 1..20: mol_type = other DNA
gtggcttatgatacaaaaga

SEQ ID NO: 13172 - DNA, 20 bp, synthetic construct
  misc_feature 1..20: note = Description of Artificial Sequence: Synthetic oligonucleotide
  misc_feature 1..20: note = Target: ANGPTL3; (-) strand; PAM type: YTN; PAM sequence: CTT
  source 1..20: mol_type = other DNA
ggtggcttatgatacaaaag

SEQ ID NO: 13173 - DNA, 20 bp, synthetic construct
  misc_feature 1..20: note = Description of Artificial Sequence: Synthetic oligonucleotide
  misc_feature 1..20: note = Target: ANGPTL3; (-) strand; PAM type: YTN; PAM sequence: TTG
  source 1..20: mol_type = other DNA
aacttggtggcttatgatac

SEQ ID NO: 13174 - DNA, 20 bp, synthetic construct
  misc_feature 1..20: note = Description of Artificial Sequence: Synthetic oligonucleotide
  misc_feature 1..20: note = Target: ANGPTL3; (-) strand; PAM type: YTN; PAM sequence: TTG
  source 1..20: mol_type = other DNA
tattgaacttggtggcttat

SEQ ID NO: 13175 - DNA, 20 bp, synthetic construct
  misc_feature 1..20: note = Description of Artificial Sequence: Synthetic oligonucleotide
  misc_feature 1..20: note = Target: ANGPTL3; (-) strand; PAM type: YTN; PAM sequence: TTC
  source 1..20: mol_type = other DNA
aagagaagattgtattgaac

SEQ ID NO: 13176 - DNA, 20 bp, synthetic construct
  misc_feature 1..20: note = Description of Artificial Sequence: Synthetic oligonucleotide
  misc_feature 1..20: note = Target: ANGPTL3; (-) strand; PAM type: YTN; PAM sequence: TTT
  source 1..20: mol_type = other DNA
caagagaagattgtattgaa

SEQ ID NO: 13177 - DNA, 20 bp, synthetic construct
  misc_feature 1..20: note = Description of Artificial Sequence: Synthetic oligonucleotide
  misc_feature 1..20: note = Target: ANGPTL3; (-) strand; PAM type: YTN; PAM sequence: TTA
  source 1..20: mol_type = other DNA
agagacgtttcaagagaaga

SEQ ID NO: 13178 - DNA, 20 bp, synthetic construct
  misc_feature 1..20: note = Description of Artificial Sequence: Synthetic oligonucleotide
  misc_feature 1..20: note = Target: ANGPTL3; (-) strand; PAM type: YTN; PAM sequence: TTA
  source 1..20: mol_type = other DNA
taagattaagagacgtttca

SEQ ID NO: 13179 - DNA, 20 bp, synthetic construct
  misc_feature 1..20: note = Description of Artificial Sequence: Synthetic oligonucleotide
  misc_feature 1..20: note = Target: ANGPTL3; (-) strand; PAM type: YTN; PAM sequence: CTT
  source 1..20: mol_type = other DNA
ataagattaagagacgtttc

SEQ ID NO: 13180 - DNA, 20 bp, synthetic construct
  misc_feature 1..20: note = Description of Artificial Sequence: Synthetic oligonucleotide
  misc_feature 1..20: note = Target: ANGPTL3; (-) strand; PAM type: YTN; PAM sequence: TTG
  source 1..20: mol_type = other DNA
gggaagaaagcttataagat

SEQ ID NO: 13181 - DNA, 20 bp, synthetic construct
  misc_feature 1..20: note = Description of Artificial Sequence: Synthetic oligonucleotide
  misc_feature 1..20: note = Target: ANGPTL3; (-) strand; PAM type: YTN; PAM sequence: TTT
  source 1..20: mol_type = other DNA
ggggaagaaagcttataaga

SEQ ID NO: 13182 - DNA, 20 bp, synthetic construct
  misc_feature 1..20: note = Description of Artificial Sequence: Synthetic oligonucleotide
  misc_feature 1..20: note = Target: ANGPTL3; (-) strand; PAM type: YTN; PAM sequence: CTT
  source 1..20: mol_type = other DNA
tggggaagaaagcttataag

SEQ ID NO: 13183 - DNA, 20 bp, synthetic construct
  misc_feature 1..20: note = Description of Artificial Sequence: Synthetic oligonucleotide
  misc_feature 1..20: note = Target: ANGPTL3; (-) strand; PAM type: YTN; PAM sequence: TTA
  source 1..20: mol_type = other DNA
aagacagtctttggggaaga

SEQ ID NO: 13184 - DNA, 20 bp, synthetic construct
  misc_feature 1..20: note = Description of Artificial Sequence: Synthetic oligonucleotide
  misc_feature 1..20: note = Target: ANGPTL3; (-) strand; PAM type: YTN; PAM sequence: CTG
  source 1..20: mol_type = other DNA
aagttaaagacagtctttgg

SEQ ID NO: 13185 - DNA, 20 bp, synthetic construct
  misc_feature 1..20: note = Description of Artificial Sequence: Synthetic oligonucleotide
  misc_feature 1..20: note = Target: ANGPTL3; (-) strand; PAM type: YTN; PAM sequence: CTA
  source 1..20: mol_type = other DNA
gcactgaagttaaagacagt

SEQ ID NO: 13186 - DNA, 20 bp, synthetic construct
  misc_feature 1..20: note = Description of Artificial Sequence: Synthetic oligonucleotide
  misc_feature 1..20: note = Target: ANGPTL3; (-) strand; PAM type: YTN; PAM sequence: TTA
  source 1..20: mol_type = other DNA
tataatctagcactgaagtt

SEQ ID NO: 13187 - DNA, 20 bp, synthetic construct
  misc_feature 1..20: note = Description of Artificial Sequence: Synthetic oligonucleotide
  misc_feature 1..20: note = Target: ANGPTL3; (-) strand; PAM type: YTN; PAM sequence: CTT
  source 1..20: mol_type = other DNA
atataatctagcactgaagt

SEQ ID NO: 13188 - DNA, 20 bp, synthetic construct
  misc_feature 1..20: note = Description of Artificial Sequence: Synthetic oligonucleotide
  misc_feature 1..20: note = Target: ANGPTL3; (-) strand; PAM type: YTN; PAM sequence: CTA
  source 1..20: mol_type = other DNA
cttatataatctagcactga

SEQ ID NO: 13189 - DNA, 20 bp, synthetic construct
  misc_feature 1..20: note = Description of Artificial Sequence: Synthetic oligonucleotide
  misc_feature 1..20: note = Target: ANGPTL3; (-) strand; PAM type: YTN; PAM sequence: TTA
  source 1..20: mol_type = other DNA
ggaggaaagaagagactact

SEQ ID NO: 13190 - DNA, 20 bp, synthetic construct
  misc_feature 1..20: note = Description of Artificial Sequence: Synthetic oligonucleotide
  misc_feature 1..20: note = Target: ANGPTL3; (-) strand; PAM type: YTN; PAM sequence: TTG
  source 1..20: mol_type = other DNA
acagggagagggacgtaaaa

SEQ ID NO: 13191 - DNA, 20 bp, synthetic construct
  misc_feature 1..20: note = Description of Artificial Sequence: Synthetic oligonucleotide
  misc_feature 1..20: note = Target: ANGPTL3; (-) strand; PAM type: YTN; PAM sequence: TTC
  source 1..20: mol_type = other DNA
ggaagattgacagggagagg

SEQ ID NO: 13192 - DNA, 20 bp, synthetic construct
  misc_feature 1..20: note = Description of Artificial Sequence: Synthetic oligonucleotide
  misc_feature 1..20: note = Target: ANGPTL3; (-) strand; PAM type: YTN; PAM sequence: TTT
  source 1..20: mol_type = other DNA
cggaagattgacagggagag

SEQ ID NO: 13193 - DNA, 20 bp, synthetic construct
  misc_feature 1..20: note = Description of Artificial Sequence: Synthetic oligonucleotide
  misc_feature 1..20: note = Target: ANGPTL3; (-) strand; PAM type: YTN; PAM sequence: TTT
  source 1..20: mol_type = other DNA
tcggaagattgacagggaga

SEQ ID NO: 13194 - DNA, 20 bp, synthetic construct
  misc_feature 1..20: note = Description of Artificial Sequence: Synthetic oligonucleotide
  misc_feature 1..20: note = Target: ANGPTL3; (-) strand; PAM type: YTN; PAM sequence: CTT
  source 1..20: mol_type = other DNA
ttcggaagattgacagggag

SEQ ID NO: 13195 - DNA, 20 bp, synthetic construct
  misc_feature 1..20: note = Description of Artificial Sequence: Synthetic oligonucleotide
  misc_feature 1..20: note = Target: ANGPTL3; (-) strand; PAM type: YTN; PAM sequence: TTC
  source 1..20: mol_type = other DNA
cttttcggaagattgacagg

SEQ ID NO: 13196 - DNA, 20 bp, synthetic construct
  misc_feature 1..20: note = Description of Artificial Sequence: Synthetic oligonucleotide
  misc_feature 1..20: note = Target: ANGPTL3; (-) strand; PAM type: YTN; PAM sequence: TTA
  source 1..20: mol_type = other DNA
caaattccttttcggaagat

SEQ ID NO: 13197 - DNA, 20 bp, synthetic construct
  misc_feature 1..20: note = Description of Artificial Sequence: Synthetic oligonucleotide
  misc_feature 1..20: note = Target: ANGPTL3; (-) strand; PAM type: YTN; PAM sequence: TTG
  source 1..20: mol_type = other DNA
aaagacacaggtccaggcag

SEQ ID NO: 13198 - DNA, 20 bp, synthetic construct
  misc_feature 1..20: note = Description of Artificial Sequence: Synthetic oligonucleotide
  misc_feature 1..20: note = Target: ANGPTL3; (-) strand; PAM type: YTN; PAM sequence: CTT
  source 1..20: mol_type = other DNA
gaaagacacaggtccaggca

SEQ ID NO: 13199 - DNA, 20 bp, synthetic construct
  misc_feature 1..20: note = Description of Artificial Sequence: Synthetic oligonucleotide
  misc_feature 1..20: note = Target: ANGPTL3; (-) strand; PAM type: YTN; PAM sequence: TTC
  source 1..20: mol_type = other DNA
agtagatgagcttgaaagac

SEQ ID NO: 13200 - DNA, 20 bp, synthetic construct
  misc_feature 1..20: note = Description of Artificial Sequence: Synthetic oligonucleotide
  misc_feature 1..20: note = Target: ANGPTL3; (-) strand; PAM type: YTN; PAM sequence: CTT
  source 1..20: mol_type = other DNA
cagtagatgagcttgaaaga

SEQ ID NO: 13201 - DNA, 20 bp, synthetic construct
  misc_feature 1..20: note = Description of Artificial Sequence: Synthetic oligonucleotide
  misc_feature 1..20: note = Target: ANGPTL3; (-) strand; PAM type: YTN; PAM sequence: TTC
  source 1..20: mol_type = other DNA
ttcagtagatgagcttgaaa

SEQ ID NO: 13202 - DNA, 20 bp, synthetic construct
  misc_feature 1..20: note = Description of Artificial Sequence: Synthetic oligonucleotide
  misc_feature 1..20: note = Target: ANGPTL3; (-) strand; PAM type: YTN; PAM sequence: CTT
  source 1..20: mol_type = other DNA
cttcagtagatgagcttgaa

SEQ ID NO: 13203 - DNA, 20 bp, synthetic construct
  misc_feature 1..20: note = Description of Artificial Sequence: Synthetic oligonucleotide
  misc_feature 1..20: note = Target: ANGPTL3; (-) strand; PAM type: YTN; PAM sequence: TTA
  source 1..20: mol_type = other DNA
cacttcttcagtagatgagc

SEQ ID NO: 13204 - DNA, 20 bp, synthetic construct
  misc_feature 1..20: note = Description of Artificial Sequence: Synthetic oligonucleotide
  misc_feature 1..20: note = Target: ANGPTL3; (-) strand; PAM type: YTN; PAM sequence: CTG
  source 1..20: mol_type = other DNA
ttacacttcttcagtagatg

SEQ ID NO: 13205 - DNA, 20 bp, synthetic construct
  misc_feature 1..20: note = Description of Artificial Sequence: Synthetic oligonucleotide
  misc_feature 1..20: note = Target: ANGPTL3; (-) strand; PAM type: YTN; PAM sequence: CTG
  source 1..20: mol_type = other DNA
ctgttacacttcttcagtag

SEQ ID NO: 13206 - DNA, 20 bp, synthetic construct
  misc_feature 1..20: note = Description of Artificial Sequence: Synthetic oligonucleotide
  misc_feature 1..20: note = Target: ANGPTL3; (-) strand; PAM type: YTN; PAM sequence: CTC
  source 1..20: mol_type = other DNA
tgctgttacacttcttcagt

SEQ ID NO: 13207 - DNA, 20 bp, synthetic construct
  misc_feature 1..20: note = Description of Artificial Sequence: Synthetic oligonucleotide
  misc_feature 1..20: note = Target: ANGPTL3; (-) strand; PAM type: YTN; PAM sequence: TTA
  source 1..20: mol_type = other DNA
tcctctgctgttacacttct

SEQ ID NO: 13208 - DNA, 20 bp, synthetic construct
  misc_feature 1..20: note = Description of Artificial Sequence: Synthetic oligonucleotide
  misc_feature 1..20: note = Target: ANGPTL3; (-) strand; PAM type: YTN; PAM sequence: TTC
  source 1..20: mol_type = other DNA
attatcctctgctgttacac

SEQ ID NO: 13209 - DNA, 20 bp, synthetic construct
  misc_feature 1..20: note = Description of Artificial Sequence: Synthetic oligonucleotide
  misc_feature 1..20: note = Target: ANGPTL3; (-) strand; PAM type: YTN; PAM sequence: TTT
  source 1..20: mol_type = other DNA
cattatcctctgctgttaca

SEQ ID NO: 13210 - DNA, 20 bp, synthetic construct
  misc_feature 1..20: note = Description of Artificial Sequence: Synthetic oligonucleotide
  misc_feature 1..20: note = Target: ANGPTL3; (-) strand; PAM type: YTN; PAM sequence: TTT
  source 1..20: mol_type = other DNA
tcattatcctctgctgttac

SEQ ID NO: 13211 - DNA, 20 bp, synthetic construct
  misc_feature 1..20: note = Description of Artificial Sequence: Synthetic oligonucleotide
  misc_feature 1..20: note = Target: ANGPTL3; (-) strand; PAM type: YTN; PAM sequence: TTG
  source 1..20: mol_type = other DNA
ttttcattatcctctgctgt

SEQ ID NO: 13212 - DNA, 20 bp, synthetic construct
  misc_feature 1..20: note = Description of Artificial Sequence: Synthetic oligonucleotide
  misc_feature 1..20: note = Target: ANGPTL3; (-) strand; PAM type: YTN; PAM sequence: TTT
  source 1..20: mol_type = other DNA
gttttcattatcctctgctg

SEQ ID NO: 13213 - DNA, 20 bp, synthetic construct
  misc_feature 1..20: note = Description of Artificial Sequence: Synthetic oligonucleotide
  misc_feature 1..20: note = Target: ANGPTL3; (-) strand; PAM type: YTN; PAM sequence: CTC
  source 1..20: mol_type = other DNA
cagacaataaaaggatttgt

SEQ ID NO: 13214 - DNA, 20 bp, synthetic construct
  misc_feature 1..20: note = Description of Artificial Sequence: Synthetic oligonucleotide
  misc_feature 1..20: note = Target: ANGPTL3; (-) strand; PAM type: YTN; PAM sequence: CTG
  source 1..20: mol_type = other DNA
taactccagacaataaaagg

SEQ ID NO: 13215 - DNA, 20 bp, synthetic construct
  misc_feature 1..20: note = Description of Artificial Sequence: Synthetic oligonucleotide
  misc_feature 1..20: note = Target: ANGPTL3; (-) strand; PAM type: YTN; PAM sequence: TTA
  source 1..20: mol_type = other DNA
tcctgtaactccagacaata

SEQ ID NO: 13216 - DNA, 20 bp, synthetic construct
  misc_feature 1..20: note = Description of Artificial Sequence: Synthetic oligonucleotide
  misc_feature 1..20: note = Target: ANGPTL3; (-) strand; PAM type: YTN; PAM sequence: TTT
  source 1..20: mol_type = other DNA
atcctgtaactccagacaat

SEQ ID NO: 13217 - DNA, 20 bp, synthetic construct
  misc_feature 1..20: note = Description of Artificial Sequence: Synthetic oligonucleotide
  misc_feature 1..20: note = Target: ANGPTL3; (-) strand; PAM type: YTN; PAM sequence: TTT
  source 1..20: mol_type = other DNA
tatcctgtaactccagacaa

SEQ ID NO: 13218 - DNA, 20 bp, synthetic construct
  misc_feature 1..20: note = Description of Artificial Sequence: Synthetic oligonucleotide
  misc_feature 1..20: note = Target: ANGPTL3; (-) strand; PAM type: YTN; PAM sequence: TTA
  source 1..20: mol_type = other DNA
ttttatcctgtaactccaga

SEQ ID NO: 13219 - DNA, 20 bp, synthetic construct
  misc_feature 1..20: note = Description of Artificial Sequence: Synthetic oligonucleotide
  misc_feature 1..20: note = Target: ANGPTL3; (-) strand; PAM type: YTN; PAM sequence: TTG
  source 1..20: mol_type = other DNA
tgcatatagtaagttatttt

SEQ ID NO: 13220 - DNA, 20 bp, synthetic construct
  misc_feature 1..20: note = Description of Artificial Sequence: Synthetic oligonucleotide
  misc_feature 1..20: note = Target: ANGPTL3; (-) strand; PAM type: YTN; PAM sequence: TTT
  source 1..20: mol_type = other DNA
gtgcatatagtaagttattt

SEQ ID NO: 13221 - DNA, 20 bp, synthetic construct
  misc_feature 1..20: note = Description of Artificial Sequence: Synthetic oligonucleotide
  misc_feature 1..20: note = Target: ANGPTL3; (-) strand; PAM type: YTN; PAM sequence: CTG
  source 1..20: mol_type = other DNA
aaagaaatttgtgcatatag

SEQ ID NO: 13222 - DNA, 20 bp, synthetic construct
  misc_feature 1..20: note = Description of Artificial Sequence: Synthetic oligonucleotide
  misc_feature 1..20: note = Target: ANGPTL3; (-) strand; PAM type: YTN; PAM sequence: TTC
  source 1..20: mol_type = other DNA
tgaaagaaatttgtgcatat

SEQ ID NO: 13223 - DNA, 20 bp, synthetic construct
  misc_feature 1..20: note = Description of Artificial Sequence: Synthetic oligonucleotide
  misc_feature 1..20: note = Target: ANGPTL3; (-) strand; PAM type: YTN; PAM sequence: CTA
  source 1..20: mol_type = other DNA
agatcccaataagattctga

SEQ ID NO: 13224 - DNA, 20 bp, synthetic construct
  misc_feature 1..20: note = Description of Artificial Sequence: Synthetic oligonucleotide
  misc_feature 1..20: note = Target: ANGPTL3; (-) strand; PAM type: YTN; PAM sequence: TTA
  source 1..20: mol_type = other DNA
agctaagatcccaataagat

SEQ ID NO: 13225 - DNA, 20 bp, synthetic construct
  misc_feature 1..20: note = Description of Artificial Sequence: Synthetic oligonucleotide
  misc_feature 1..20: note = Target: ANGPTL3; (-) strand; PAM type: YTN; PAM sequence: TTT
  source 1..20: mol_type = other DNA
aagctaagatcccaataaga

SEQ ID NO: 13226 - DNA, 20 bp, synthetic construct
  misc_feature 1..20: note = Description of Artificial Sequence: Synthetic oligonucleotide
  misc_feature 1..20: note = Target: ANGPTL3; (-) strand; PAM type: YTN; PAM sequence: CTA
  source 1..20: mol_type = other DNA
agatttaagctaagatccca

SEQ ID NO: 13227 - DNA, 20 bp, synthetic construct
  misc_feature 1..20: note = Description of Artificial Sequence: Synthetic oligonucleotide
  misc_feature 1..20: note = Target: ANGPTL3; (-) strand; PAM type: YTN; PAM sequence: TTC
  source 1..20: mol_type = other DNA
taagatttaagctaagatcc

SEQ ID NO: 13228 - DNA, 20 bp, synthetic construct
  misc_feature 1..20: note = Description of Artificial Sequence: Synthetic oligonucleotide
  misc_feature 1..20: note = Target: ANGPTL3; (-) strand; PAM type: YTN; PAM sequence: TTA
  source 1..20: mol_type = other DNA
aagtaaaattctaagattta

SEQ ID NO: 13229 - DNA, 20 bp, synthetic construct
  misc_feature 1..20: note = Description of Artificial Sequence: Synthetic oligonucleotide
  misc_feature 1..20: note = Target: ANGPTL3; (-) strand; PAM type: YTN; PAM sequence: TTT
  source 1..20: mol_type = other DNA
aaagtaaaattctaagattt

SEQ ID NO: 13230 - DNA, 20 bp, synthetic construct
  misc_feature 1..20: note = Description of Artificial Sequence: Synthetic oligonucleotide
  misc_feature 1..20: note = Target: ANGPTL3; (-) strand; PAM type: YTN; PAM sequence: TTT
  source 1..20: mol_type = other DNA
taaagtaaaattctaagatt

SEQ ID NO: 13231 - DNA, 20 bp, synthetic construct
  misc_feature 1..20: note = Description of Artificial Sequence: Synthetic oligonucleotide
  misc_feature 1..20: note = Target: ANGPTL3; (-) strand; PAM type: YTN; PAM sequence: TTC
  source 1..20: mol_type = other DNA
atatgcaattttaaagtaaa

SEQ ID NO: 13232 - DNA, 20 bp, synthetic construct
  misc_feature 1..20: note = Description of Artificial Sequence: Synthetic oligonucleotide
  misc_feature 1..20: note = Target: ANGPTL3; (-) strand; PAM type: YTN; PAM sequence: TTA
  source 1..20: mol_type = other DNA
taaagtataaaacacaattc

SEQ ID NO: 13233 - DNA, 20 bp, synthetic construct
  misc_feature 1..20: note = Description of Artificial Sequence: Synthetic oligonucleotide
  misc_feature 1..20: note = Target: ANGPTL3; (-) strand; PAM type: YTN; PAM sequence: TTT
  source 1..20: mol_type = other DNA
ataaagtataaaacacaatt

SEQ ID NO: 13234 - DNA, 20 bp, synthetic construct
  misc_feature 1..20: note = Description of Artificial Sequence: Synthetic oligonucleotide
  misc_feature 1..20: note = Target: ANGPTL3; (-) strand; PAM type: YTN; PAM sequence: CTG
  source 1..20: mol_type = other DNA
caggcatgaagatagattta

SEQ ID NO: 13235 - DNA, 20 bp, synthetic construct
  misc_feature 1..20: note = Description of Artificial Sequence: Synthetic oligonucleotide
  misc_feature 1..20: note = Target: ANGPTL3; (-) strand; PAM type: YTN; PAM sequence: TTA
  source 1..20: mol_type = other DNA
caggtgtgagccactgcagg

SEQ ID NO: 13236 - DNA, 20 bp, synthetic construct
  misc_feature 1..20: note = Description of Artificial Sequence: Synthetic oligonucleotide
  misc_feature 1..20: note = Target: ANGPTL3; (-) strand; PAM type: YTN; PAM sequence: TTG
  source 1..20: mol_type = other DNA
gattacaggtgtgagccact

SEQ ID NO: 13237 - DNA, 20 bp, synthetic construct
  misc_feature 1..20: note = Description of Artificial Sequence: Synthetic oligonucleotide
  misc_feature 1..20: note = Target: ANGPTL3; (-) strand; PAM type: YTN; PAM sequence: CTT
  source 1..20: mol_type = other DNA
ggattacaggtgtgagccac

SEQ ID NO: 13238 - DNA, 20 bp, synthetic construct
  misc_feature 1..20: note = Description of Artificial Sequence: Synthetic oligonucleotide
  misc_feature 1..20: note = Target: ANGPTL3; (-) strand; PAM type: YTN; PAM sequence: CTC
  source 1..20: mol_type = other DNA
ccaaaatacttggattacag

SEQ ID NO: 13239 - DNA, 20 bp, synthetic construct
  misc_feature 1..20: note = Description of Artificial Sequence: Synthetic oligonucleotide
  misc_feature 1..20: note = Target: ANGPTL3; (-) strand; PAM type: YTN; PAM sequence: CTC
  source 1..20: mol_type = other DNA
ccgccccggcctcccaaaat

SEQ ID NO: 13240 - DNA, 20 bp, synthetic construct
  misc_feature 1..20: note = Description of Artificial Sequence: Synthetic oligonucleotide
  misc_feature 1..20: note = Target: ANGPTL3; (-) strand; PAM type: YTN; PAM sequence: TTC
  source 1..20: mol_type = other DNA
aagcagtactcccgccccgg

SEQ ID NO: 13241 - DNA, 20 bp, synthetic construct
  misc_feature 1..20: note = Description of Artificial Sequence: Synthetic oligonucleotide
  misc_feature 1..20: note = Target: ANGPTL3; (-) strand; PAM type: YTN; PAM sequence: CTG
  source 1..20: mol_type = other DNA
ggttcaagcagtactcccgc

SEQ ID NO: 13242 - DNA, 20 bp, synthetic construct
  misc_feature 1..20: note = Description of Artificial Sequence: Synthetic oligonucleotide
  misc_feature 1..20: note = Target: ANGPTL3; (-) strand; PAM type: YTN; PAM sequence: CTC
  source 1..20: mol_type = other DNA
ctgggttcaagcagtactcc

SEQ ID NO: 13243 - DNA, 20 bp, synthetic construct
  misc_feature 1..20: note = Description of Artificial Sequence: Synthetic oligonucleotide
  misc_feature 1..20: note = Target: ANGPTL3; (-) strand; PAM type: YTN; PAM sequence: TTG
  source 1..20: mol_type = other DNA
gactcctgggttcaagcagt

SEQ ID NO: 13244 - DNA, 20 bp, synthetic construct
  misc_feature 1..20: note = Description of Artificial Sequence: Synthetic oligonucleotide
  misc_feature 1..20: note = Target: ANGPTL3; (-) strand; PAM type: YTN; PAM sequence: CTT
  source 1..20: mol_type = other DNA
ggactcctgggttcaagcag

SEQ ID NO: 13245 - DNA, 20 bp, synthetic construct
  misc_feature 1..20: note = Description of Artificial Sequence: Synthetic oligonucleotide
  misc_feature 1..20: note = Target: ANGPTL3; (-) strand; PAM type: YTN; PAM sequence: CTG
  source 1..20: mol_type = other DNA
atcttggactcctgggttca

SEQ ID NO: 13246 - DNA, 20 bp, synthetic construct
  misc_feature 1..20: note = Description of Artificial Sequence: Synthetic oligonucleotide
  misc_feature 1..20: note = Target: ANGPTL3; (-) strand; PAM type: YTN; PAM sequence: TTG
  source 1..20: mol_type = other DNA
cacaggctgatcttggactc

SEQ ID NO: 13247 - DNA, 20 bp, synthetic construct
  misc_feature 1..20: note = Description of Artificial Sequence: Synthetic oligonucleotide
  misc_feature 1..20: note = Target: ANGPTL3; (-) strand; PAM type: YTN; PAM sequence: TTG
  source 1..20: mol_type = other DNA
ccgtgttgcacaggctgatc

SEQ ID NO: 13248 - DNA, 20 bp, synthetic construct
  misc_feature 1..20: note = Description of Artificial Sequence: Synthetic oligonucleotide
  misc_feature 1..20: note = Target: ANGPTL3; (-) strand; PAM type: YTN; PAM sequence: TTT
  source 1..20: mol_type = other DNA
gccgtgttgcacaggctgat

SEQ ID NO: 13249 - DNA, 20 bp, synthetic construct
  misc_feature 1..20: note = Description of Artificial Sequence: Synthetic oligonucleotide
  misc_feature 1..20: note = Target: ANGPTL3; (-) strand; PAM type: YTN; PAM sequence: TTT
  source 1..20: mol_type = other DNA
tgccgtgttgcacaggctga

SEQ ID NO: 13250 - DNA, 20 bp, synthetic construct
  misc_feature 1..20: note = Description of Artificial Sequence: Synthetic oligonucleotide
  misc_feature 1..20: note = Target: ANGPTL3; (-) strand; PAM type: YTN; PAM sequence: TTG
  source 1..20: mol_type = other DNA
tagaggtggagttttgccgt

SEQ ID NO: 13251 - DNA, 20 bp, synthetic construct
  misc_feature 1..20: note = Description of Artificial Sequence: Synthetic oligonucleotide
  misc_feature 1..20: note = Target: ANGPTL3; (-) strand; PAM type: YTN; PAM sequence: TTT
  source 1..20: mol_type = other DNA
gtagaggtggagttttgccg

SEQ ID NO: 13252 - DNA, 20 bp, synthetic construct
  misc_feature 1..20: note = Description of Artificial Sequence: Synthetic oligonucleotide
  misc_feature 1..20: note = Target: ANGPTL3; (-) strand; PAM type: YTN; PAM sequence: TTT
  source 1..20: mol_type = other DNA
tgtagaggtggagttttgcc

SEQ ID NO: 13253 - DNA, 20 bp, synthetic construct
  misc_feature 1..20: note = Description of Artificial Sequence: Synthetic oligonucleotide
  misc_feature 1..20: note = Target: ANGPTL3; (-) strand; PAM type: YTN; PAM sequence: TTT
  source 1..20: mol_type = other DNA
ttgtagaggtggagttttgc

SEQ ID NO: 13254 - DNA, 20 bp, synthetic construct
  misc_feature 1..20: note = Description of Artificial Sequence: Synthetic oligonucleotide
  misc_feature 1..20: note = Target: ANGPTL3; (-) strand; PAM type: YTN; PAM sequence: TTT
  source 1..20: mol_type = other DNA
tttgtagaggtggagttttg

SEQ ID NO: 13255 - DNA, 20 bp, synthetic construct
  misc_feature 1..20: note = Description of Artificial Sequence: Synthetic oligonucleotide
  misc_feature 1..20: note = Target: ANGPTL3; (-) strand; PAM type: YTN; PAM sequence: TTG
  source 1..20: mol_type = other DNA
tattttttgtagaggtggag

SEQ ID NO: 13256 - DNA, 20 bp, synthetic construct
  misc_feature 1..20: note = Description of Artificial Sequence: Synthetic oligonucleotide
  misc_feature 1..20: note = Target: ANGPTL3; (-) strand; PAM type: YTN; PAM sequence: TTT
  source 1..20: mol_type = other DNA
gtattttttgtagaggtgga

SEQ ID NO: 13257 - DNA, 20 bp, synthetic construct
  misc_feature 1..20: note = Description of Artificial Sequence: Synthetic oligonucleotide
  misc_feature 1..20: note = Target: ANGPTL3; (-) strand; PAM type: YTN; PAM sequence: TTT
  source 1..20: mol_type = other DNA
tgtattttttgtagaggtgg

SEQ ID NO: 13258 - DNA, 20 bp, synthetic construct
  misc_feature 1..20: note = Description of Artificial Sequence: Synthetic oligonucleotide
  misc_feature 1..20: note = Target: ANGPTL3; (-) strand; PAM type: YTN; PAM sequence: TTT
  source 1..20: mol_type = other DNA
ttgtattttttgtagaggtg

SEQ ID NO: 13259 - DNA, 20 bp, synthetic construct
  misc_feature 1..20: note = Description of Artificial Sequence: Synthetic oligonucleotide
  misc_feature 1..20: note = Target: ANGPTL3; (-) strand; PAM type: YTN; PAM sequence: CTA
  source 1..20: mol_type = other DNA
atttttgtattttttgtaga

SEQ ID NO: 13260 - DNA, 20 bp, synthetic construct
  misc_feature 1..20: note = Description of Artificial Sequence: Synthetic oligonucleotide
  misc_feature 1..20: note = Target: ANGPTL3; (-) strand; PAM type: YTN; PAM sequence: CTG
  source 1..20: mol_type = other DNA
ccaccacacccagctaattt

SEQ ID NO: 13261 - DNA, 20 bp, synthetic construct
  misc_feature 1..20: note = Description of Artificial Sequence: Synthetic oligonucleotide
  misc_feature 1..20: note = Target: ANGPTL3; (-) strand; PAM type: YTN; PAM sequence: TTA
  source 1..20: mol_type = other DNA
caggcacctgccaccacacc

SEQ ID NO: 13262 - DNA, 20 bp, synthetic construct
  misc_feature 1..20: note = Description of Artificial Sequence: Synthetic oligonucleotide
  misc_feature 1..20: note = Target: ANGPTL3; (-) strand; PAM type: YTN; PAM sequence: TTG
  source 1..20: mol_type = other DNA
ggattacaggcacctgccac

SEQ ID NO: 13263 - DNA, 20 bp, synthetic construct
  misc_feature 1..20: note = Description of Artificial Sequence: Synthetic oligonucleotide
  misc_feature 1..20: note = Target: ANGPTL3; (-) strand; PAM type: YTN; PAM sequence: CTC
  source 1..20: mol_type = other DNA
ccaagtagttgggattacag

SEQ ID NO: 13264 - DNA, 20 bp, synthetic construct
  misc_feature 1..20: note = Description of Artificial Sequence: Synthetic oligonucleotide
  misc_feature 1..20: note = Target: ANGPTL3; (-) strand; PAM type: YTN; PAM sequence: CTC
  source 1..20: mol_type = other DNA
agcctcccaagtagttggga

SEQ ID NO: 13265 - DNA, 20 bp, synthetic construct
  misc_feature 1..20: note = Description of Artificial Sequence: Synthetic oligonucleotide
  misc_feature 1..20: note = Target: ANGPTL3; (-) strand; PAM type: YTN; PAM sequence: CTG
  source 1..20: mol_type = other DNA
cctcagcctcccaagtagtt

SEQ ID NO: 13266 - DNA, 20 bp, synthetic construct
  misc_feature 1..20: note = Description of Artificial Sequence: Synthetic oligonucleotide
  misc_feature 1..20: note = Target: ANGPTL3; (-) strand; PAM type: YTN; PAM sequence: CTC
  source 1..20: mol_type = other DNA
ctgcctcagcctcccaagta

SEQ ID NO: 13267 - DNA, 20 bp, synthetic construct
  misc_feature 1..20: note = Description of Artificial Sequence: Synthetic oligonucleotide
  misc_feature 1..20: note = Target: ANGPTL3; (-) strand; PAM type: YTN; PAM sequence: TTC
  source 1..20: mol_type = other DNA
tcctgcctcagcctcccaag

SEQ ID NO: 13268 - DNA, 20 bp, synthetic construct
  misc_feature 1..20: note = Description of Artificial Sequence: Synthetic oligonucleotide
  misc_feature 1..20: note = Target: ANGPTL3; (-) strand; PAM type: YTN; PAM sequence: CTC
  source 1..20: mol_type = other DNA
cagcgattctcctgcctcag

SEQ ID NO: 13269 - DNA, 20 bp, synthetic construct
  misc_feature 1..20: note = Description of Artificial Sequence: Synthetic oligonucleotide
  misc_feature 1..20: note = Target: ANGPTL3; (-) strand; PAM type: YTN; PAM sequence: TTC
  source 1..20: mol_type = other DNA
ccaggctccagcgattctcc

SEQ ID NO: 13270 - DNA, 20 bp, synthetic construct
  misc_feature 1..20: note = Description of Artificial Sequence: Synthetic oligonucleotide
  misc_feature 1..20: note = Target: ANGPTL3; (-) strand; PAM type: YTN; PAM sequence: CTT
  source 1..20: mol_type = other DNA
cccaggctccagcgattctc

SEQ ID NO: 13271 - DNA, 20 bp, synthetic construct
  misc_feature 1..20: note = Description of Artificial Sequence: Synthetic oligonucleotide
  misc_feature 1..20: note = Target: ANGPTL3; (-) strand; PAM type: YTN; PAM sequence: TTG
  source 1..20: mol_type = other DNA
acttcccaggctccagcgat

SEQ ID NO: 13272 - DNA, 20 bp, synthetic construct
  misc_feature 1..20: note = Description of Artificial Sequence: Synthetic oligonucleotide
  misc_feature 1..20: note = Target: ANGPTL3; (-) strand; PAM type: YTN; PAM sequence: CTT
  source 1..20: mol_type = other DNA
gacttcccaggctccagcga

SEQ ID NO: 13273 - DNA, 20 bp, synthetic construct
  misc_feature 1..20: note = Description of Artificial Sequence: Synthetic oligonucleotide
  misc_feature 1..20: note = Target: ANGPTL3; (-) strand; PAM type: YTN; PAM sequence: CTG
  source 1..20: mol_type = other DNA
caggcttgacttcccaggct

SEQ ID NO: 13274 - DNA, 20 bp, synthetic construct
  misc_feature 1..20: note = Description of Artificial Sequence: Synthetic oligonucleotide
  misc_feature 1..20: note = Target: ANGPTL3; (-) strand; PAM type: YTN; PAM sequence: TTC
  source 1..20: mol_type = other DNA
gctgcaggcttgacttccca

SEQ ID NO: 13275 - DNA, 20 bp, synthetic construct
  misc_feature 1..20: note = Description of Artificial Sequence: Synthetic oligonucleotide
  misc_feature 1..20: note = Target: ANGPTL3; (-) strand; PAM type: YTN; PAM sequence: TTA
  source 1..20: mol_type = other DNA
ggatcatggttcgctgcagg

SEQ ID NO: 13276 - DNA, 20 bp, synthetic construct
  misc_feature 1..20: note = Description of Artificial Sequence: Synthetic oligonucleotide
  misc_feature 1..20: note = Target: ANGPTL3; (-) strand; PAM type: YTN; PAM sequence: CTA
  source 1..20: mol_type = other DNA
gaatgcagtgttaggatcat

SEQ ID NO: 13277 - DNA, 20 bp, synthetic construct
  misc_feature 1..20: note = Description of Artificial Sequence: Synthetic oligonucleotide
  misc_feature 1..20: note = Target: ANGPTL3; (-) strand; PAM type: YTN; PAM sequence: TTG
  source 1..20: mol_type = other DNA
cccaggctagaatgcagtgt

SEQ ID NO: 13278 - DNA, 20 bp, synthetic construct
  misc_feature 1..20: note = Description of Artificial Sequence: Synthetic oligonucleotide
  misc_feature 1..20: note = Target: ANGPTL3; (-) strand; PAM type: YTN; PAM sequence: CTG
  source 1..20: mol_type = other DNA
ttgcccaggctagaatgcag

SEQ ID NO: 13279 - DNA, 20 bp, synthetic construct
  misc_feature 1..20: note = Description of Artificial Sequence: Synthetic oligonucleotide
  misc_feature 1..20: note = Target: ANGPTL3; (-) strand; PAM type: YTN; PAM sequence: CTC
  source 1..20: mol_type = other DNA
tgttgcccaggctagaatgc

SEQ ID NO: 13280 - DNA, 20 bp, synthetic construct
  misc_feature 1..20: note = Description of Artificial Sequence: Synthetic oligonucleotide
  misc_feature 1..20: note = Target: ANGPTL3; (-) strand; PAM type: YTN; PAM sequence: CTC
  source 1..20: mol_type = other DNA
actctgttgcccaggctaga

SEQ ID NO: 13281 - DNA, 20 bp, synthetic construct
  misc_feature 1..20: note = Description of Artificial Sequence: Synthetic oligonucleotide
  misc_feature 1..20: note = Target: ANGPTL3; (-) strand; PAM type: YTN; PAM sequence: TTG
  source 1..20: mol_type = other DNA
agacagagtctcactctgtt

SEQ ID NO: 13282 - DNA, 20 bp, synthetic construct
  misc_feature 1..20: note = Description of Artificial Sequence: Synthetic oligonucleotide
  misc_feature 1..20: note = Target: ANGPTL3; (-) strand; PAM type: YTN; PAM sequence: TTT
  source 1..20: mol_type = other DNA
gagacagagtctcactctgt

SEQ ID NO: 13283 - DNA, 20 bp, synthetic construct
  misc_feature 1..20: note = Description of Artificial Sequence: Synthetic oligonucleotide
  misc_feature 1..20: note = Target: ANGPTL3; (-) strand; PAM type: YTN; PAM sequence: TTT
  source 1..20: mol_type = other DNA
tgagacagagtctcactctg

SEQ ID NO: 13284 - DNA, 20 bp, synthetic construct
  misc_feature 1..20: note = Description of Artificial Sequence: Synthetic oligonucleotide
  misc_feature 1..20: note = Target: ANGPTL3; (-) strand; PAM type: YTN; PAM sequence: TTT
  source 1..20: mol_type = other DNA
ttgagacagagtctcactct

SEQ ID NO: 13285 - DNA, 20 bp, synthetic construct
  misc_feature 1..20: note = Description of Artificial Sequence: Synthetic oligonucleotide
  misc_feature 1..20: note = Target: ANGPTL3; (-) strand; PAM type: YTN; PAM sequence: TTT
  source 1..20: mol_type = other DNA
tttgagacagagtctcactc

SEQ ID NO: 13286 - DNA, 20 bp, synthetic construct
  misc_feature 1..20: note = Description of Artificial Sequence: Synthetic oligonucleotide
  misc_feature 1..20: note = Target: ANGPTL3; (-) strand; PAM type: YTN; PAM sequence: TTT
  source 1..20: mol_type = other DNA
ttttgagacagagtctcact

SEQ ID NO: 13287 - DNA, 20 bp, synthetic construct
  misc_feature 1..20: note = Description of Artificial Sequence: Synthetic oligonucleotide
  misc_feature 1..20: note = Target: ANGPTL3; (-) strand; PAM type: YTN; PAM sequence: TTT
  source 1..20: mol_type = other DNA
tttttgagacagagtctcac

SEQ ID NO: 13288 - DNA, 20 bp, synthetic construct
  misc_feature 1..20: note = Description of Artificial Sequence: Synthetic oligonucleotide
  misc_feature 1..20: note = Target: ANGPTL3; (-) strand; PAM type: YTN; PAM sequence: TTA
  source 1..20: mol_type = other DNA
tatgaagattttttttgaga

SEQ ID NO: 13289 - DNA, 20 bp, synthetic construct
  misc_feature 1..20: note = Description of Artificial Sequence: Synthetic oligonucleotide
  misc_feature 1..20: note = Target: ANGPTL3; (-) strand; PAM type: YTN; PAM sequence: TTT
  source 1..20: mol_type = other DNA
atatgaagattttttttgag

SEQ ID NO: 13290 - DNA, 20 bp, synthetic construct
  misc_feature 1..20: note = Description of Artificial Sequence: Synthetic oligonucleotide
  misc_feature 1..20: note = Target: ANGPTL3; (-) strand; PAM type: YTN; PAM sequence: TTT
  source 1..20: mol_type = other DNA
tatatgaagattttttttga

SEQ ID NO: 13291 - DNA, 20 bp, synthetic construct
  misc_feature 1..20: note = Description of Artificial Sequence: Synthetic oligonucleotide
  misc_feature 1..20: note = Target: ANGPTL3; (-) strand; PAM type: YTN; PAM sequence: TTT
  source 1..20: mol_type = other DNA
ttatatgaagattttttttg

SEQ ID NO: 13292 - DNA, 20 bp, synthetic construct
  misc_feature 1..20: note = Description of Artificial Sequence: Synthetic oligonucleotide
  misc_feature 1..20: note = Target: ANGPTL3; (-) strand; PAM type: YTN; PAM sequence: TTG
  source 1..20: mol_type = other DNA
gggggaaataaatattttta

SEQ ID NO: 13293 - DNA, 20 bp, synthetic construct
  misc_feature 1..20: note = Description of Artificial Sequence: Synthetic oligonucleotide
  misc_feature 1..20: note = Target: ANGPTL3; (-) strand; PAM type: YTN; PAM sequence: CTT
  source 1..20: mol_type = other DNA
ggggggaaataaatattttt

SEQ ID NO: 13294 - DNA, 20 bp, synthetic construct
  misc_feature 1..20: note = Description of Artificial Sequence: Synthetic oligonucleotide
  misc_feature 1..20: note = Target: ANGPTL3; (-) strand; PAM type: YTN; PAM sequence: TTA
  source 1..20: mol_type = other DNA
aatacttggggggaaataaa

SEQ ID NO: 13295 - DNA, 20 bp, synthetic construct
  misc_feature 1..20: note = Description of Artificial Sequence: Synthetic oligonucleotide
  misc_feature 1..20: note = Target: ANGPTL3; (-) strand; PAM type: YTN; PAM sequence: TTT
  source 1..20: mol_type = other DNA
aaatacttggggggaaataa

SEQ ID NO: 13296 - DNA, 20 bp, synthetic construct
  misc_feature 1..20: note = Description of Artificial Sequence: Synthetic oligonucleotide
  misc_feature 1..20: note = Target: ANGPTL3; (-) strand; PAM type: YTN; PAM sequence: TTT
  source 1..20: mol_type = other DNA
taaatacttggggggaaata

SEQ ID NO: 13297 - DNA, 20 bp, synthetic construct
  misc_feature 1..20: note = Description of Artificial Sequence: Synthetic oligonucleotide
  misc_feature 1..20: note = Target: ANGPTL3; (-) strand; PAM type: YTN; PAM sequence: TTT
  source 1..20: mol_type = other DNA
ttaaatacttggggggaaat

SEQ ID NO: 13298 - DNA, 20 bp, synthetic construct
  misc_feature 1..20: note = Description of Artificial Sequence: Synthetic oligonucleotide
  misc_feature 1..20: note = Target: ANGPTL3; (-) strand; PAM type: YTN; PAM sequence: CTT
  source 1..20: mol_type = other DNA
tttaaatacttggggggaaa

SEQ ID NO: 13299 - DNA, 20 bp, synthetic construct
  misc_feature 1..20: note = Description of Artificial Sequence: Synthetic oligonucleotide
  misc_feature 1..20: note = Target: ANGPTL3; (-) strand; PAM type: YTN; PAM sequence: CTA
  source 1..20: mol_type = other DNA
ggaacatcactttttaaata

SEQ ID NO: 13300 - DNA, 20 bp, synthetic construct
  misc_feature 1..20: note = Description of Artificial Sequence: Synthetic oligonucleotide
  misc_feature 1..20: note = Target: ANGPTL3; (-) strand; PAM type: YTN; PAM sequence: TTC
  source 1..20: mol_type = other DNA
taggaacatcactttttaaa

SEQ ID NO: 13301 - DNA, 20 bp, synthetic construct
  misc_feature 1..20: note = Description of Artificial Sequence: Synthetic oligonucleotide
  misc_feature 1..20: note = Target: ANGPTL3; (-) strand; PAM type: YTN; PAM sequence: CTT
  source 1..20: mol_type = other DNA
ctaggaacatcactttttaa

SEQ ID NO: 13302 - DNA, 20 bp, synthetic construct
  misc_feature 1..20: note = Description of Artificial Sequence: Synthetic oligonucleotide
  misc_feature 1..20: note = Target: ANGPTL3; (-) strand; PAM type: YTN; PAM sequence: TTC
  source 1..20: mol_type = other DNA
acaggataaacatgacacat

SEQ ID NO: 13303 - DNA, 20 bp, synthetic construct
  misc_feature 1..20: note = Description of Artificial Sequence: Synthetic oligonucleotide
  misc_feature 1..20: note = Target: ANGPTL3; (-) strand; PAM type: YTN; PAM sequence: CTA
  source 1..20: mol_type = other DNA
tatgggacgtgcaagttcac

SEQ ID NO: 13304 - DNA, 20 bp, synthetic construct
  misc_feature 1..20: note = Description of Artificial Sequence: Synthetic oligonucleotide
  misc_feature 1..20: note = Target: ANGPTL3; (-) strand; PAM type: YTN; PAM sequence: TTG
  source 1..20: mol_type = other DNA
tgagggcacaactatatggg

SEQ ID NO: 13305 - DNA, 20 bp, synthetic construct
  misc_feature 1..20: note = Description of Artificial Sequence: Synthetic oligonucleotide
  misc_feature 1..20: note = Target: ANGPTL3; (-) strand; PAM type: YTN; PAM sequence: CTT
  source 1..20: mol_type = other DNA
gtgagggcacaactatatgg

SEQ ID NO: 13306 - DNA, 20 bp, synthetic construct
  misc_feature 1..20: note = Description of Artificial Sequence: Synthetic oligonucleotide
  misc_feature 1..20: note = Target: ANGPTL3; (-) strand; PAM type: YTN; PAM sequence: TTC
  source 1..20: mol_type = other DNA
ttgtgagggcacaactatat

SEQ ID NO: 13307 - DNA, 20 bp, synthetic construct
  misc_feature 1..20: note = Description of Artificial Sequence: Synthetic oligonucleotide
  misc_feature 1..20: note = Target: ANGPTL3; (-) strand; PAM type: YTN; PAM sequence: TTG
  source 1..20: mol_type = other DNA
gagtatacattcttgtgagg

SEQ ID NO: 13308 - DNA, 20 bp, synthetic construct
  misc_feature 1..20: note = Description of Artificial Sequence: Synthetic oligonucleotide
  misc_feature 1..20: note = Target: ANGPTL3; (-) strand; PAM type: YTN; PAM sequence: CTA
  source 1..20: mol_type = other DNA
attggagtatacattcttgt

SEQ ID NO: 13309 - DNA, 20 bp, synthetic construct
  misc_feature 1..20: note = Description of Artificial Sequence: Synthetic oligonucleotide
  misc_feature 1..20: note = Target: ANGPTL3; (-) strand; PAM type: YTN; PAM sequence: TTC
  source 1..20: mol_type = other DNA
taattggagtatacattctt

SEQ ID NO: 13310 - DNA, 20 bp, synthetic construct
  misc_feature 1..20: note = Description of Artificial Sequence: Synthetic oligonucleotide
  misc_feature 1..20: note = Target: ANGPTL3; (-) strand; PAM type: YTN; PAM sequence: CTT
  source 1..20: mol_type = other DNA
ctaattggagtatacattct

SEQ ID NO: 13311 - DNA, 20 bp, synthetic construct
  misc_feature 1..20: note = Description of Artificial Sequence: Synthetic oligonucleotide
  misc_feature 1..20: note = Target: ANGPTL3; (-) strand; PAM type: YTN; PAM sequence: CTC
  source 1..20: mol_type = other DNA
ttctaattggagtatacatt

SEQ ID NO: 13312 - DNA, 20 bp, synthetic construct
  misc_feature 1..20: note = Description of Artificial Sequence: Synthetic oligonucleotide
  misc_feature 1..20: note = Target: ANGPTL3; (-) strand; PAM type: YTN; PAM sequence: CTA
  source 1..20: mol_type = other DNA
tactcttctaattggagtat

SEQ ID NO: 13313 - DNA, 20 bp, synthetic construct
  misc_feature 1..20: note = Description of Artificial Sequence: Synthetic oligonucleotide
  misc_feature 1..20: note = Target: ANGPTL3; (-) strand; PAM type: YTN; PAM sequence: TTC
  source 1..20: mol_type = other DNA
caaaggcctatactcttcta

SEQ ID NO: 13314 - DNA, 20 bp, synthetic construct
  misc_feature 1..20: note = Description of Artificial Sequence: Synthetic oligonucleotide
  misc_feature 1..20: note = Target: ANGPTL3; (-) strand; PAM type: YTN; PAM sequence: TTG
  source 1..20: mol_type = other DNA
ttccaaaggcctatactctt

SEQ ID NO: 13315 - DNA, 20 bp, synthetic construct
  misc_feature 1..20: note = Description of Artificial Sequence: Synthetic oligonucleotide
  misc_feature 1..20: note = Target: ANGPTL3; (-) strand; PAM type: YTN; PAM sequence: TTT
  source 1..20: mol_type = other DNA
gttccaaaggcctatactct

SEQ ID NO: 13316 - DNA, 20 bp, synthetic construct
  misc_feature 1..20: note = Description of Artificial Sequence: Synthetic oligonucleotide
  misc_feature 1..20: note = Target: ANGPTL3; (-) strand; PAM type: YTN; PAM sequence: TTT
  source 1..20: mol_type = other DNA
tgttccaaaggcctatactc

SEQ ID NO: 13317 - DNA, 20 bp, synthetic construct
  misc_feature 1..20: note = Description of Artificial Sequence: Synthetic oligonucleotide
  misc_feature 1..20: note = Target: ANGPTL3; (-) strand; PAM type: YTN; PAM sequence: TTG
  source 1..20: mol_type = other DNA
gattttgttccaaaggccta

SEQ ID NO: 13318 - DNA, 20 bp, synthetic construct
  misc_feature 1..20: note = Description of Artificial Sequence: Synthetic oligonucleotide
  misc_feature 1..20: note = Target: ANGPTL3; (-) strand; PAM type: YTN; PAM sequence: TTT
  source 1..20: mol_type = other DNA
ggattttgttccaaaggcct

SEQ ID NO: 13319 - DNA, 20 bp, synthetic construct
  misc_feature 1..20: note = Description of Artificial Sequence: Synthetic oligonucleotide
  misc_feature 1..20: note = Target: ANGPTL3; (-) strand; PAM type: YTN; PAM sequence: TTT
  source 1..20: mol_type = other DNA
tggattttgttccaaaggcc

SEQ ID NO: 13320 - DNA, 20 bp, synthetic construct
  misc_feature 1..20: note = Description of Artificial Sequence: Synthetic oligonucleotide
  misc_feature 1..20: note = Target: ANGPTL3; (-) strand; PAM type: YTN; PAM sequence: CTG
  source 1..20: mol_type = other DNA
gaaggattttggattttgtt

SEQ ID NO: 13321 - DNA, 20 bp, synthetic construct
  misc_feature 1..20: note = Description of Artificial Sequence: Synthetic oligonucleotide
  misc_feature 1..20: note = Target: ANGPTL3; (-) strand; PAM type: YTN; PAM sequence: TTG
  source 1..20: mol_type = other DNA
aaaacctggaaggattttgg

SEQ ID NO: 13322 - DNA, 20 bp, synthetic construct
  misc_feature 1..20: note = Description of Artificial Sequence: Synthetic oligonucleotide
  misc_feature 1..20: note = Target: ANGPTL3; (-) strand; PAM type: YTN; PAM sequence: TTT
  source 1..20: mol_type = other DNA
gaaaacctggaaggattttg

SEQ ID NO: 13323 - DNA, 20 bp, synthetic construct
  misc_feature 1..20: note = Description of Artificial Sequence: Synthetic oligonucleotide
  misc_feature 1..20: note = Target: ANGPTL3; (-) strand; PAM type: YTN; PAM sequence: TTT
  source 1..20: mol_type = other DNA
tgaaaacctggaaggatttt

SEQ ID NO: 13324 - DNA, 20 bp, synthetic construct
  misc_feature 1..20: note = Description of Artificial Sequence: Synthetic oligonucleotide
  misc_feature 1..20: note = Target: ANGPTL3; (-) strand; PAM type: YTN; PAM sequence: CTT
  source 1..20: mol_type = other DNA
ttgaaaacctggaaggattt

SEQ ID NO: 13325 - DNA, 20 bp, synthetic construct
  misc_feature 1..20: note = Description of Artificial Sequence: Synthetic oligonucleotide
  misc_feature 1..20: note = Target: ANGPTL3; (-) strand; PAM type: YTN; PAM sequence: TTG
  source 1..20: mol_type = other DNA
gggccaggtgatagagactt

SEQ ID NO: 13326 - DNA, 20 bp, synthetic construct
  misc_feature 1..20: note = Description of Artificial Sequence: Synthetic oligonucleotide
  misc_feature 1..20: note = Target: ANGPTL3; (-) strand; PAM type: YTN; PAM sequence: TTT
  source 1..20: mol_type = other DNA
ggggccaggtgatagagact

SEQ ID NO: 13327 - DNA, 20 bp, synthetic construct
  misc_feature 1..20: note = Description of Artificial Sequence: Synthetic oligonucleotide
  misc_feature 1..20: note = Target: ANGPTL3; (-) strand; PAM type: YTN; PAM sequence: CTG
  source 1..20: mol_type = other DNA
aagaggtaatttggggccag

SEQ ID NO: 13328 - DNA, 20 bp, synthetic construct
  misc_feature 1..20: note = Description of Artificial Sequence: Synthetic oligonucleotide
  misc_feature 1..20: note = Target: ANGPTL3; (-) strand; PAM type: YTN; PAM sequence: TTG
  source 1..20: mol_type = other DNA
tgggaaaaaatggctgaaga

SEQ ID NO: 13329 - DNA, 20 bp, synthetic construct
  misc_feature 1..20: note = Description of Artificial Sequence: Synthetic oligonucleotide
  misc_feature 1..20: note = Target: ANGPTL3; (-) strand; PAM type: YTN; PAM sequence: TTG
  source 1..20: mol_type = other DNA
tgttgtgggaaaaaatggct

SEQ ID NO: 13330 - DNA, 20 bp, synthetic construct
  misc_feature 1..20: note = Description of Artificial Sequence: Synthetic oligonucleotide
  misc_feature 1..20: note = Target: ANGPTL3; (-) strand; PAM type: YTN; PAM sequence: TTT
  source 1..20: mol_type = other DNA
gtgttgtgggaaaaaatggc

SEQ ID NO: 13331 - DNA, 20 bp, synthetic construct
  misc_feature 1..20: note = Description of Artificial Sequence: Synthetic oligonucleotide
  misc_feature 1..20: note = Target: ANGPTL3; (-) strand; PAM type: YTN; PAM sequence: TTG
  source 1..20: mol_type = other DNA
atgagagcagaaggtttgtg

SEQ ID NO: 13332 - DNA, 20 bp, synthetic construct
  misc_feature 1..20: note = Description of Artificial Sequence: Synthetic oligonucleotide
  misc_feature 1..20: note = Target: ANGPTL3; (-) strand; PAM type: YTN; PAM sequence: TTT
  source 1..20: mol_type = other DNA
gatgagagcagaaggtttgt

SEQ ID NO: 13333 - DNA, 20 bp, synthetic construct
  misc_feature 1..20: note = Description of Artificial Sequence: Synthetic oligonucleotide
  misc_feature 1..20: note = Target: ANGPTL3; (-) strand; PAM type: YTN; PAM sequence: TTT
  source 1..20: mol_type = other DNA
tgatgagagcagaaggtttg

SEQ ID NO: 13334 - DNA, 20 bp, synthetic construct
  misc_feature 1..20: note = Description of Artificial Sequence: Synthetic oligonucleotide
  misc_feature 1..20: note = Target: ANGPTL3; (-) strand; PAM type: YTN; PAM sequence: TTA
  source 1..20: mol_type = other DNA
aaagtagatcgttttgatga

SEQ ID NO: 13335 - DNA, 20 bp, synthetic construct
  misc_feature 1..20: note = Description of Artificial Sequence: Synthetic oligonucleotide
  misc_feature 1..20: note = Target: ANGPTL3; (-) strand; PAM type: YTN; PAM sequence: TTT
  source 1..20: mol_type = other DNA
aaaagtagatcgttttgatg

SEQ ID NO: 13336 - DNA, 20 bp, synthetic construct
  misc_feature 1..20: note = Description of Artificial Sequence: Synthetic oligonucleotide
  misc_feature 1..20: note = Target: ANGPTL3; (-) strand; PAM type: YTN; PAM sequence: TTA
  source 1..20: mol_type = other DNA
ggaaggcatagaggagatgt

SEQ ID NO: 13337 - DNA, 20 bp, synthetic construct
  misc_feature 1..20: note = Description of Artificial Sequence: Synthetic oligonucleotide
  misc_feature 1..20: note = Target: ANGPTL3; (-) strand; PAM type: YTN; PAM sequence: CTA
  source 1..20: mol_type = other DNA
gacaaatggaatacattagg

SEQ ID NO: 13338 - DNA, 20 bp, synthetic construct
  misc_feature 1..20: note = Description of Artificial Sequence: Synthetic oligonucleotide
  misc_feature 1..20: note = Target: ANGPTL3; (-) strand; PAM type: YTN; PAM sequence: TTC
  source 1..20: mol_type = other DNA
tagacaaatggaatacatta

SEQ ID NO: 13339 - DNA, 20 bp, synthetic construct
  misc_feature 1..20: note = Description of Artificial Sequence: Synthetic oligonucleotide
  misc_feature 1..20: note = Target: ANGPTL3; (-) strand; PAM type: YTN; PAM sequence: CTA
  source 1..20: mol_type = other DNA
gccaatcagaaatgtgtggg

SEQ ID NO: 13340 - DNA, 20 bp, synthetic construct
  misc_feature 1..20: note = Description of Artificial Sequence: Synthetic oligonucleotide
  misc_feature 1..20: note = Target: ANGPTL3; (-) strand; PAM type: YTN; PAM sequence: TTA
  source 1..20: mol_type = other DNA
aaatacggcacaatctagcc

SEQ ID NO: 13341 - DNA, 20 bp, synthetic construct
  misc_feature 1..20: note = Description of Artificial Sequence: Synthetic oligonucleotide
  misc_feature 1..20: note = Target: ANGPTL3; (-) strand; PAM type: YTN; PAM sequence: CTT
  source 1..20: mol_type = other DNA
aaaatacggcacaatctagc

SEQ ID NO: 13342 - DNA, 20 bp, synthetic construct
  misc_feature 1..20: note = Description of Artificial Sequence: Synthetic oligonucleotide
  misc_feature 1..20: note = Target: ANGPTL3; (-) strand; PAM type: YTN; PAM sequence: CTG
  source 1..20: mol_type = other DNA
caccttaaaatacggcacaa

SEQ ID NO: 13343 - DNA, 20 bp, synthetic construct
  misc_feature 1..20: note = Description of Artificial Sequence: Synthetic oligonucleotide
  misc_feature 1..20: note = Target: ANGPTL3; (-) strand; PAM type: YTN; PAM sequence: TTG
  source 1..20: mol_type = other DNA
agatatctgcaccttaaaat

SEQ ID NO: 13344 - DNA, 20 bp, synthetic construct
  misc_feature 1..20: note = Description of Artificial Sequence: Synthetic oligonucleotide
  misc_feature 1..20: note = Target: ANGPTL3; (-) strand; PAM type: YTN; PAM sequence: TTG
  source 1..20: mol_type = other DNA
tggaagaattgagatatctg

SEQ ID NO: 13345 - DNA, 20 bp, synthetic construct
  misc_feature 1..20: note = Description of Artificial Sequence: Synthetic oligonucleotide
  misc_feature 1..20: note = Target: ANGPTL3; (-) strand; PAM type: YTN; PAM sequence: TTT
  source 1..20: mol_type = other DNA
gtggaagaattgagatatct

SEQ ID NO: 13346 - DNA, 20 bp, synthetic construct
  misc_feature 1..20: note = Description of Artificial Sequence: Synthetic oligonucleotide
  misc_feature 1..20: note = Target: ANGPTL3; (-) strand; PAM type: YTN; PAM sequence: CTA
  source 1..20: mol_type = other DNA
gaatatttgtggaagaattg

SEQ ID NO: 13347 - DNA, 20 bp, synthetic construct
  misc_feature 1..20: note = Description of Artificial Sequence: Synthetic oligonucleotide
  misc_feature 1..20: note = Target: ANGPTL3; (-) strand; PAM type: YTN; PAM sequence: TTA
  source 1..20: mol_type = other DNA
ctagaatatttgtggaagaa

SEQ ID NO: 13348 - DNA, 20 bp, synthetic construct
  misc_feature 1..20: note = Description of Artificial Sequence: Synthetic oligonucleotide
  misc_feature 1..20: note = Target: ANGPTL3; (-) strand; PAM type: YTN; PAM sequence: TTT
  source 1..20: mol_type = other DNA
actagaatatttgtggaaga

SEQ ID NO: 13349 - DNA, 20 bp, synthetic construct
  misc_feature 1..20: note = Description of Artificial Sequence: Synthetic oligonucleotide
  misc_feature 1..20: note = Target: ANGPTL3; (-) strand; PAM type: YTN; PAM sequence: CTG
  source 1..20: mol_type = other DNA
ccatttactagaatatttgt

SEQ ID NO: 13350 - DNA, 20 bp, synthetic construct
  misc_feature 1..20: note = Description of Artificial Sequence: Synthetic oligonucleotide
  misc_feature 1..20: note = Target: ANGPTL3; (-) strand; PAM type: YTN; PAM sequence: TTC
  source 1..20: mol_type = other DNA
agatgaacaagctgccattt

SEQ ID NO: 13351 - DNA, 20 bp, synthetic construct
  misc_feature 1..20: note = Description of Artificial Sequence: Synthetic oligonucleotide
  misc_feature 1..20: note = Target: ANGPTL3; (-) strand; PAM type: YTN; PAM sequence: TTT
  source 1..20: mol_type = other DNA
cagatgaacaagctgccatt

SEQ ID NO: 13352 - DNA, 20 bp, synthetic construct
  misc_feature 1..20: note = Description of Artificial Sequence: Synthetic oligonucleotide
  misc_feature 1..20: note = Target: ANGPTL3; (-) strand; PAM type: YTN; PAM sequence: CTG
  source 1..20: mol_type = other DNA
tgtggtttcagatgaacaag

SEQ ID NO: 13353 - DNA, 20 bp, synthetic construct
  misc_feature 1..20: note = Description of Artificial Sequence: Synthetic oligonucleotide
  misc_feature 1..20: note = Target: ANGPTL3; (-) strand; PAM type: YTN; PAM sequence: TTC
  source 1..20: mol_type = other DNA
tgtgtggtttcagatgaaca

SEQ ID NO: 13354 - DNA, 20 bp, synthetic construct
  misc_feature 1..20: note = Description of Artificial Sequence: Synthetic oligonucleotide
  misc_feature 1..20: note = Target: ANGPTL3; (-) strand; PAM type: YTN; PAM sequence: TTG
  source 1..20: mol_type = other DNA
aggtgtatggacagtaattc

SEQ ID NO: 13355 - DNA, 20 bp, synthetic construct
  misc_feature 1..20: note = Description of Artificial Sequence: Synthetic oligonucleotide
  misc_feature 1..20: note = Target: ANGPTL3; (-) strand; PAM type: YTN; PAM sequence: TTT
  source 1..20: mol_type = other DNA
gaggtgtatggacagtaatt

SEQ ID NO: 13356 - DNA, 20 bp, synthetic construct
  misc_feature 1..20: note = Description of Artificial Sequence: Synthetic oligonucleotide
  misc_feature 1..20: note = Target: ANGPTL3; (-) strand; PAM type: YTN; PAM sequence: CTA
  source 1..20: mol_type = other DNA
agtgccatttgaggtgtatg

SEQ ID NO: 13357 - DNA, 20 bp, synthetic construct
  misc_feature 1..20: note = Description of Artificial Sequence: Synthetic oligonucleotide
  misc_feature 1..20: note = Target: ANGPTL3; (-) strand; PAM type: YTN; PAM sequence: CTC
  source 1..20: mol_type = other DNA
actaagtgccatttgaggtg

SEQ ID NO: 13358 - DNA, 20 bp, synthetic construct
  misc_feature 1..20: note = Description of Artificial Sequence: Synthetic oligonucleotide
  misc_feature 1..20: note = Target: ANGPTL3; (-) strand; PAM type: YTN; PAM sequence: TTC
  source 1..20: mol_type = other DNA
tcactaagtgccatttgagg

SEQ ID NO: 13359 - DNA, 20 bp, synthetic construct
  misc_feature 1..20: note = Description of Artificial Sequence: Synthetic oligonucleotide
  misc_feature 1..20: note = Target: ANGPTL3; (-) strand; PAM type: YTN; PAM sequence: TTT
  source 1..20: mol_type = other DNA
ctcactaagtgccatttgag

SEQ ID NO: 13360 - DNA, 20 bp, synthetic construct
  misc_feature 1..20: note = Description of Artificial Sequence: Synthetic oligonucleotide
  misc_feature 1..20: note = Target: ANGPTL3; (-) strand; PAM type: YTN; PAM sequence: TTT
  source 1..20: mol_type = other DNA
tctcactaagtgccatttga

SEQ ID NO: 13361 - DNA, 20 bp, synthetic construct
  misc_feature 1..20: note = Description of Artificial Sequence: Synthetic oligonucleotide
  misc_feature 1..20: note = Target: ANGPTL3; (-) strand; PAM type: YTN; PAM sequence: CTG
  source 1..20: mol_type = other DNA
tgtattttctcactaagtgc

SEQ ID NO: 13362 - DNA, 20 bp, synthetic construct
  misc_feature 1..20: note = Description of Artificial Sequence: Synthetic oligonucleotide
  misc_feature 1..20: note = Target: ANGPTL3; (-) strand; PAM type: YTN; PAM sequence: TTC
  source 1..20: mol_type = other DNA
tgtgtattttctcactaagt

SEQ ID NO: 13363 - DNA, 20 bp, synthetic construct
  misc_feature 1..20: note = Description of Artificial Sequence: Synthetic oligonucleotide
  misc_feature 1..20: note = Target: ANGPTL3; (-) strand; PAM type: YTN; PAM sequence: TTG
  source 1..20: mol_type = other DNA
ccatattctgtgtattttct

SEQ ID NO: 13364 - DNA, 20 bp, synthetic construct
  misc_feature 1..20: note = Description of Artificial Sequence: Synthetic oligonucleotide
  misc_feature 1..20: note = Target: ANGPTL3; (-) strand; PAM type: YTN; PAM sequence: TTT
  source 1..20: mol_type = other DNA
gccatattctgtgtattttc

SEQ ID NO: 13365 - DNA, 20 bp, synthetic construct
  misc_feature 1..20: note = Description of Artificial Sequence: Synthetic oligonucleotide
  misc_feature 1..20: note = Target: ANGPTL3; (-) strand; PAM type: YTN; PAM sequence: TTA
  source 1..20: mol_type = other DNA
tgatttgccatattctgtgt

SEQ ID NO: 13366 - DNA, 20 bp, synthetic construct
  misc_feature 1..20: note = Description of Artificial Sequence: Synthetic oligonucleotide
  misc_feature 1..20: note = Target: ANGPTL3; (-) strand; PAM type: YTN; PAM sequence: TTA
  source 1..20: mol_type = other DNA
ttatgatttgccatattctg

SEQ ID NO: 13367 - DNA, 20 bp, synthetic construct
  misc_feature 1..20: note = Description of Artificial Sequence: Synthetic oligonucleotide
  misc_feature 1..20: note = Target: ANGPTL3; (-) strand; PAM type: YTN; PAM sequence: TTA
  source 1..20: mol_type = other DNA
ttattatgatttgccatatt

SEQ ID NO: 13368 - DNA, 20 bp, synthetic construct
  misc_feature 1..20: note = Description of Artificial Sequence: Synthetic oligonucleotide
  misc_feature 1..20: note = Target: ANGPTL3; (-) strand; PAM type: YTN; PAM sequence: TTT
  source 1..20: mol_type = other DNA
attattatgatttgccatat

SEQ ID NO: 13369 - DNA, 20 bp, synthetic construct
  misc_feature 1..20: note = Description of Artificial Sequence: Synthetic oligonucleotide
  misc_feature 1..20: note = Target: ANGPTL3; (-) strand; PAM type: YTN; PAM sequence: TTT
  source 1..20: mol_type = other DNA
tattattatgatttgccata

SEQ ID NO: 13370 - DNA, 20 bp, synthetic construct
  misc_feature 1..20: note = Description of Artificial Sequence: Synthetic oligonucleotide
  misc_feature 1..20: note = Target: ANGPTL3; (-) strand; PAM type: YTN; PAM sequence: TTT
  source 1..20: mol_type = other DNA
ttattattatgatttgccat

SEQ ID NO: 13371 - DNA, 20 bp, synthetic construct
  misc_feature 1..20: note = Description of Artificial Sequence: Synthetic oligonucleotide
  misc_feature 1..20: note = Target: ANGPTL3; (-) strand; PAM type: YTN; PAM sequence: TTC
  source 1..20: mol_type = other DNA
agaatttttattattatgat

SEQ ID NO: 13372 - DNA, 20 bp, synthetic construct
  misc_feature 1..20: note = Description of Artificial Sequence: Synthetic oligonucleotide
  misc_feature 1..20: note = Target: ANGPTL3; (-) strand; PAM type: YTN; PAM sequence: TTT
  source 1..20: mol_type = other DNA
cagaatttttattattatga

SEQ ID NO: 13373 - DNA, 20 bp, synthetic construct
  misc_feature 1..20: note = Description of Artificial Sequence: Synthetic oligonucleotide
  misc_feature 1..20: note = Target: ANGPTL3; (-) strand; PAM type: YTN; PAM sequence: TTT
  source 1..20: mol_type = other DNA
tcagaatttttattattatg

SEQ ID NO: 13374 - DNA, 20 bp, synthetic construct
  misc_feature 1..20: note = Description of Artificial Sequence: Synthetic oligonucleotide
  misc_feature 1..20: note = Target: ANGPTL3; (-) strand; PAM type: YTN; PAM sequence: TTT
  source 1..20: mol_type = other DNA
ttcagaatttttattattat

SEQ ID NO: 13375 - DNA, 20 bp, synthetic construct
  misc_feature 1..20: note = Description of Artificial Sequence: Synthetic oligonucleotide
  misc_feature 1..20: note = Target: ANGPTL3; (-) strand; PAM type: YTN; PAM sequence: CTA
  source 1..20: mol_type = other DNA
tttttcagaatttttattat

SEQ ID NO: 13376 - DNA, 20 bp, synthetic construct
  misc_feature 1..20: note = Description of Artificial Sequence: Synthetic oligonucleotide
  misc_feature 1..20: note = Target: ANGPTL3; (-) strand; PAM type: YTN; PAM sequence: TTA
  source 1..20: mol_type = other DNA
gtactatttttcagaatttt

SEQ ID NO: 13377 - DNA, 20 bp, synthetic construct
  misc_feature 1..20: note = Description of Artificial Sequence: Synthetic oligonucleotide
  misc_feature 1..20: note = Target: ANGPTL3; (-) strand; PAM type: YTN; PAM sequence: TTT
  source 1..20: mol_type = other DNA
agtactatttttcagaattt

SEQ ID NO: 13378 - DNA, 20 bp, synthetic construct
  misc_feature 1..20: note = Description of Artificial Sequence: Synthetic oligonucleotide
  misc_feature 1..20: note = Target: ANGPTL3; (-) strand; PAM type: YTN; PAM sequence: TTT
  source 1..20: mol_type = other DNA
tagtactatttttcagaatt

SEQ ID NO: 13379 - DNA, 20 bp, synthetic construct
  misc_feature 1..20: note = Description of Artificial Sequence: Synthetic oligonucleotide
  misc_feature 1..20: note = Target: ANGPTL3; (-) strand; PAM type: YTN; PAM sequence: CTT
  source 1..20: mol_type = other DNA
ttagtactatttttcagaat

SEQ ID NO: 13380 - DNA, 20 bp, synthetic construct
  misc_feature 1..20: note = Description of Artificial Sequence: Synthetic oligonucleotide
  misc_feature 1..20: note = Target: ANGPTL3; (-) strand; PAM type: YTN; PAM sequence: TTG
  source 1..20: mol_type = other DNA
gagcttttagtactattttt

SEQ ID NO: 13381 - DNA, 20 bp, synthetic construct
  misc_feature 1..20: note = Description of Artificial Sequence: Synthetic oligonucleotide
  misc_feature 1..20: note = Target: ANGPTL3; (-) strand; PAM type: YTN; PAM sequence: TTT
  source 1..20: mol_type = other DNA
ggagcttttagtactatttt

SEQ ID NO: 13382 - DNA, 20 bp, synthetic construct
  misc_feature 1..20: note = Description of Artificial Sequence: Synthetic oligonucleotide
  misc_feature 1..20: note = Target: ANGPTL3; (-) strand; PAM type: YTN; PAM sequence: TTT
  source 1..20: mol_type = other DNA
tggagcttttagtactattt

SEQ ID NO: 13383 - DNA, 20 bp, synthetic construct
  misc_feature 1..20: note = Description of Artificial Sequence: Synthetic oligonucleotide
  misc_feature 1..20: note = Target: ANGPTL3; (-) strand; PAM type: YTN; PAM sequence: CTT
  source 1..20: mol_type = other DNA
ttggagcttttagtactatt

SEQ ID NO: 13384 - DNA, 20 bp, synthetic construct
  misc_feature 1..20: note = Description of Artificial Sequence: Synthetic oligonucleotide
  misc_feature 1..20: note = Target: ANGPTL3; (-) strand; PAM type: YTN; PAM sequence: TTG
  source 1..20: mol_type = other DNA
atgcttttggagcttttagt

SEQ ID NO: 13385 - DNA, 20 bp, synthetic construct
  misc_feature 1..20: note = Description of Artificial Sequence: Synthetic oligonucleotide
  misc_feature 1..20: note = Target: ANGPTL3; (-) strand; PAM type: YTN; PAM sequence: TTT
  source 1..20: mol_type = other DNA
gatgcttttggagcttttag

SEQ ID NO: 13386 - DNA, 20 bp, synthetic construct
  misc_feature 1..20: note = Description of Artificial Sequence: Synthetic oligonucleotide
  misc_feature 1..20: note = Target: ANGPTL3; (-) strand; PAM type: YTN; PAM sequence: CTT
  source 1..20: mol_type = other DNA
tgatgcttttggagctttta

SEQ ID NO: 13387 - DNA, 20 bp, synthetic construct
  misc_feature 1..20: note = Description of Artificial Sequence: Synthetic oligonucleotide
  misc_feature 1..20: note = Target: ANGPTL3; (-) strand; PAM type: YTN; PAM sequence: CTA
  source 1..20: mol_type = other DNA
tctttgatgcttttggagct

SEQ ID NO: 13388 - DNA, 20 bp, synthetic construct
  misc_feature 1..20: note = Description of Artificial Sequence: Synthetic oligonucleotide
  misc_feature 1..20: note = Target: ANGPTL3; (-) strand; PAM type: YTN; PAM sequence: CTG
  source 1..20: mol_type = other DNA
actatctttgatgcttttgg

SEQ ID NO: 13389 - DNA, 20 bp, synthetic construct
  misc_feature 1..20: note = Description of Artificial Sequence: Synthetic oligonucleotide
  misc_feature 1..20: note = Target: ANGPTL3; (-) strand; PAM type: YTN; PAM sequence: CTA
  source 1..20: mol_type = other DNA
aaatcaggtaaactgactat

SEQ ID NO: 13390 - DNA, 20 bp, synthetic construct
  misc_feature 1..20: note = Description of Artificial Sequence: Synthetic oligonucleotide
  misc_feature 1..20: note = Target: ANGPTL3; (-) strand; PAM type: YTN; PAM sequence: TTC
  source 1..20: mol_type = other DNA
actaaaatcaggtaaactga

SEQ ID NO: 13391 - DNA, 20 bp, synthetic construct
  misc_feature 1..20: note = Description of Artificial Sequence: Synthetic oligonucleotide
  misc_feature 1..20: note = Target: ANGPTL3; (-) strand; PAM type: YTN; PAM sequence: TTC
  source 1..20: mol_type = other DNA
agtaattcactaaaatcagg

SEQ ID NO: 13392 - DNA, 20 bp, synthetic construct
  misc_feature 1..20: note = Description of Artificial Sequence: Synthetic oligonucleotide
  misc_feature 1..20: note = Target: ANGPTL3; (-) strand; PAM type: YTN; PAM sequence: TTT
  source 1..20: mol_type = other DNA
cagtaattcactaaaatcag

SEQ ID NO: 13393 - DNA, 20 bp, synthetic construct
  misc_feature 1..20: note = Description of Artificial Sequence: Synthetic oligonucleotide
  misc_feature 1..20: note = Target: ANGPTL3; (-) strand; PAM type: YTN; PAM sequence: TTT
  source 1..20: mol_type = other DNA
tcagtaattcactaaaatca

SEQ ID NO: 13394 - DNA, 20 bp, synthetic construct
  misc_feature 1..20: note = Description of Artificial Sequence: Synthetic oligonucleotide
  misc_feature 1..20: note = Target: ANGPTL3; (-) strand; PAM type: YTN; PAM sequence: TTT
  source 1..20: mol_type = other DNA
ttcagtaattcactaaaatc

SEQ ID NO: 13395 - DNA, 20 bp, synthetic construct
  misc_feature 1..20: note = Description of Artificial Sequence: Synthetic oligonucleotide
  misc_feature 1..20: note = Target: ANGPTL3; (-) strand; PAM type: YTN; PAM sequence: TTG
  source 1..20: mol_type = other DNA
atatagaaatttttcagtaa

SEQ ID NO: 13396 - DNA, 20 bp, synthetic construct
  misc_feature 1..20: note = Description of Artificial Sequence: Synthetic oligonucleotide
  misc_feature 1..20: note = Target: ANGPTL3; (-) strand; PAM type: YTN; PAM sequence: CTT
  source 1..20: mol_type = other DNA
gatatagaaatttttcagta

SEQ ID NO: 13397 - DNA, 20 bp, synthetic construct
  misc_feature 1..20: note = Description of Artificial Sequence: Synthetic oligonucleotide
  misc_feature 1..20: note = Target: ANGPTL3; (-) strand; PAM type: YTN; PAM sequence: CTC
  source 1..20: mol_type = other DNA
ttgatatagaaatttttcag

SEQ ID NO: 13398 - DNA, 20 bp, synthetic construct
  misc_feature 1..20: note = Description of Artificial Sequence: Synthetic oligonucleotide
  misc_feature 1..20: note = Target: ANGPTL3; (-) strand; PAM type: YTN; PAM sequence: TTC
  source 1..20: mol_type = other DNA
aaaataaactcttgatatag

SEQ ID NO: 13399 - DNA, 20 bp, synthetic construct
  misc_feature 1..20: note = Description of Artificial Sequence: Synthetic oligonucleotide
  misc_feature 1..20: note = Target: ANGPTL3; (-) strand; PAM type: YTN; PAM sequence: CTG
  source 1..20: mol_type = other DNA
gttcaaaataaactcttgat

SEQ ID NO: 13400 - DNA, 20 bp, synthetic construct
  misc_feature 1..20: note = Description of Artificial Sequence: Synthetic oligonucleotide
  misc_feature 1..20: note = Target: ANGPTL3; (-) strand; PAM type: YTN; PAM sequence: TTC
  source 1..20: mol_type = other DNA
atactggttcaaaataaact

SEQ ID NO: 13401 - DNA, 20 bp, synthetic construct
  misc_feature 1..20: note = Description of Artificial Sequence: Synthetic oligonucleotide
  misc_feature 1..20: note = Target: ANGPTL3; (-) strand; PAM type: YTN; PAM sequence: TTC
  source 1..20: mol_type = other DNA
agtaaaattcatactggttc

SEQ ID NO: 13402 - DNA, 20 bp, synthetic construct
  misc_feature 1..20: note = Description of Artificial Sequence: Synthetic oligonucleotide
  misc_feature 1..20: note = Target: ANGPTL3; (-) strand; PAM type: YTN; PAM sequence: TTT
  source 1..20: mol_type = other DNA
cagtaaaattcatactggtt

SEQ ID NO: 13403 - DNA, 20 bp, synthetic construct
  misc_feature 1..20: note = Description of Artificial Sequence: Synthetic oligonucleotide
  misc_feature 1..20: note = Target: ANGPTL3; (-) strand; PAM type: YTN; PAM sequence: TTG
  source 1..20: mol_type = other DNA
gtttcagtaaaattcatact

SEQ ID NO: 13404 - DNA, 20 bp, synthetic construct
  misc_feature 1..20: note = Description of Artificial Sequence: Synthetic oligonucleotide
  misc_feature 1..20: note = Target: ANGPTL3; (-) strand; PAM type: YTN; PAM sequence: CTT
  source 1..20: mol_type = other DNA
ggtttcagtaaaattcatac

SEQ ID NO: 13405 - DNA, 20 bp, synthetic construct
  misc_feature 1..20: note = Description of Artificial Sequence: Synthetic oligonucleotide
  misc_feature 1..20: note = Target: ANGPTL3; (-) strand; PAM type: YTN; PAM sequence: CTC
  source 1..20: mol_type = other DNA
ataatgagacatgtgtgtac

SEQ ID NO: 13406 - DNA, 20 bp, synthetic construct
  misc_feature 1..20: note = Description of Artificial Sequence: Synthetic oligonucleotide
  misc_feature 1..20: note = Target: ANGPTL3; (-) strand; PAM type: YTN; PAM sequence: TTA
  source 1..20: mol_type = other DNA
cctcataatgagacatgtgt

SEQ ID NO: 13407 - DNA, 20 bp, synthetic construct
  misc_feature 1..20: note = Description of Artificial Sequence: Synthetic oligonucleotide
  misc_feature 1..20: note = Target: ANGPTL3; (-) strand; PAM type: YTN; PAM sequence: CTA
  source 1..20: mol_type = other DNA
gattacctcataatgagaca

SEQ ID NO: 13408 - DNA, 20 bp, synthetic construct
  misc_feature 1..20: note = Description of Artificial Sequence: Synthetic oligonucleotide
  misc_feature 1..20: note = Target: ANGPTL3; (-) strand; PAM type: YTN; PAM sequence: CTA
  source 1..20: mol_type = other DNA
cactagattacctcataatg

SEQ ID NO: 13409 - DNA, 20 bp, synthetic construct
  misc_feature 1..20: note = Description of Artificial Sequence: Synthetic oligonucleotide
  misc_feature 1..20: note = Target: ANGPTL3; (-) strand; PAM type: YTN; PAM sequence: TTA
  source 1..20: mol_type = other DNA
tactacactagattacctca

SEQ ID NO: 13410 - DNA, 20 bp, synthetic construct
  misc_feature 1..20: note = Description of Artificial Sequence: Synthetic oligonucleotide
  misc_feature 1..20: note = Target: ANGPTL3; (-) strand; PAM type: YTN; PAM sequence: TTC
  source 1..20: mol_type = other DNA
caggatgacagagtgtatgg

SEQ ID NO: 13411 - DNA, 20 bp, synthetic construct
  misc_feature 1..20: note = Description of Artificial Sequence: Synthetic oligonucleotide
  misc_feature 1..20: note = Target: ANGPTL3; (-) strand; PAM type: YTN; PAM sequence: CTG
  source 1..20: mol_type = other DNA
attccaggatgacagagtgt

SEQ ID NO: 13412 - DNA, 20 bp, synthetic construct
  misc_feature 1..20: note = Description of Artificial Sequence: Synthetic oligonucleotide
  misc_feature 1..20: note = Target: ANGPTL3; (-) strand; PAM type: YTN; PAM sequence: TTA
  source 1..20: mol_type = other DNA
ggaagtaaagatacaagcat

SEQ ID NO: 13413 - DNA, 20 bp, synthetic construct
  misc_feature 1..20: note = Description of Artificial Sequence: Synthetic oligonucleotide
  misc_feature 1..20: note = Target: ANGPTL3; (-) strand; PAM type: YTN; PAM sequence: CTA
  source 1..20: mol_type = other DNA
ttaggaagtaaagatacaag

SEQ ID NO: 13414 - DNA, 20 bp, synthetic construct
  misc_feature 1..20: note = Description of Artificial Sequence: Synthetic oligonucleotide
  misc_feature 1..20: note = Target: ANGPTL3; (-) strand; PAM type: YTN; PAM sequence: TTA
  source 1..20: mol_type = other DNA
tgctattaggaagtaaagat

SEQ ID NO: 13415 - DNA, 20 bp, synthetic construct
  misc_feature 1..20: note = Description of Artificial Sequence: Synthetic oligonucleotide
  misc_feature 1..20: note = Target: ANGPTL3; (-) strand; PAM type: YTN; PAM sequence: TTC
  source 1..20: mol_type = other DNA
catgagttatgctattagga

SEQ ID NO: 13416 - DNA, 20 bp, synthetic construct
  misc_feature 1..20: note = Description of Artificial Sequence: Synthetic oligonucleotide
  misc_feature 1..20: note = Target: ANGPTL3; (-) strand; PAM type: YTN; PAM sequence: CTT
  source 1..20: mol_type = other DNA
ccatgagttatgctattagg

SEQ ID NO: 13417 - DNA, 20 bp, synthetic construct
  misc_feature 1..20: note = Description of Artificial Sequence: Synthetic oligonucleotide
  misc_feature 1..20: note = Target: ANGPTL3; (-) strand; PAM type: YTN; PAM sequence: TTG
  source 1..20: mol_type = other DNA
acttccatgagttatgctat

SEQ ID NO: 13418 - DNA, 20 bp, synthetic construct
  misc_feature 1..20: note = Description of Artificial Sequence: Synthetic oligonucleotide
  misc_feature 1..20: note = Target: ANGPTL3; (-) strand; PAM type: YTN; PAM sequence: TTA
  source 1..20: mol_type = other DNA
gttgacttccatgagttatg

SEQ ID NO: 13419 - DNA, 20 bp, synthetic construct
  misc_feature 1..20: note = Description of Artificial Sequence: Synthetic oligonucleotide
  misc_feature 1..20: note = Target: ANGPTL3; (-) strand; PAM type: YTN; PAM sequence: TTA
  source 1..20: mol_type = other DNA
atgaatgagttagttgactt

SEQ ID NO: 13420 - DNA, 20 bp, synthetic construct
  misc_feature 1..20: note = Description of Artificial Sequence: Synthetic oligonucleotide
  misc_feature 1..20: note = Target: ANGPTL3; (-) strand; PAM type: YTN; PAM sequence: CTA
  source 1..20: mol_type = other DNA
aaattaatgaatgagttagt

SEQ ID NO: 13421 - DNA, 20 bp, synthetic construct
  misc_feature 1..20: note = Description of Artificial Sequence: Synthetic oligonucleotide
  misc_feature 1..20: note = Target: ANGPTL3; (-) strand; PAM type: YTN; PAM sequence: TTC
  source 1..20: mol_type = other DNA
taaaattaatgaatgagtta

SEQ ID NO: 13422 - DNA, 20 bp, synthetic construct
  misc_feature 1..20: note = Description of Artificial Sequence: Synthetic oligonucleotide
  misc_feature 1..20: note = Target: ANGPTL3; (-) strand; PAM type: YTN; PAM sequence: TTT
  source 1..20: mol_type = other DNA
ctaaaattaatgaatgagtt

SEQ ID NO: 13423 - DNA, 20 bp, synthetic construct
  misc_feature 1..20: note = Description of Artificial Sequence: Synthetic oligonucleotide
  misc_feature 1..20: note = Target: ANGPTL3; (-) strand; PAM type: YTN; PAM sequence: TTA
  source 1..20: mol_type = other DNA
atgaataccatttctaaaat

SEQ ID NO: 13424 - DNA, 20 bp, synthetic construct
  misc_feature 1..20: note = Description of Artificial Sequence: Synthetic oligonucleotide
  misc_feature 1..20: note = Target: ANGPTL3; (-) strand; PAM type: YTN; PAM sequence: TTT
  source 1..20: mol_type = other DNA
aatgaataccatttctaaaa

SEQ ID NO: 13425 - DNA, 20 bp, synthetic construct
  misc_feature 1..20: note = Description of Artificial Sequence: Synthetic oligonucleotide
  misc_feature 1..20: note = Target: ANGPTL3; (-) strand; PAM type: YTN; PAM sequence: TTG
  source 1..20: mol_type = other DNA
tttaatgaataccatttcta

SEQ ID NO: 13426 - DNA, 20 bp, synthetic construct
  misc_feature 1..20: note = Description of Artificial Sequence: Synthetic oligonucleotide
  misc_feature 1..20: note = Target: ANGPTL3; (-) strand; PAM type: YTN; PAM sequence: CTC
  source 1..20: mol_type = other DNA
aataagtgttgtttaatgaa

SEQ ID NO: 13427 - DNA, 20 bp, synthetic construct
  misc_feature 1..20: note = Description of Artificial Sequence: Synthetic oligonucleotide
  misc_feature 1..20: note = Target: ANGPTL3; (-) strand; PAM type: YTN; PAM sequence: TTA
  source 1..20: mol_type = other DNA
aaggagacaaatagtagatg

SEQ ID NO: 13428 - DNA, 20 bp, synthetic construct
  misc_feature 1..20: note = Description of Artificial Sequence: Synthetic oligonucleotide
  misc_feature 1..20: note = Target: ANGPTL3; (-) strand; PAM type: YTN; PAM sequence: TTT
  source 1..20: mol_type = other DNA
aaaggagacaaatagtagat

SEQ ID NO: 13429 - DNA, 20 bp, synthetic construct
  misc_feature 1..20: note = Description of Artificial Sequence: Synthetic oligonucleotide
  misc_feature 1..20: note = Target: ANGPTL3; (-) strand; PAM type: YTN; PAM sequence: TTT
  source 1..20: mol_type = other DNA
taaaggagacaaatagtaga

SEQ ID NO: 13430 - DNA, 20 bp, synthetic construct
  misc_feature 1..20: note = Description of Artificial Sequence: Synthetic oligonucleotide
  misc_feature 1..20: note = Target: ANGPTL3; (-) strand; PAM type: YTN; PAM sequence: TTT
  source 1..20: mol_type = other DNA
ttaaaggagacaaatagtag

SEQ ID NO: 13431 - DNA, 20 bp, synthetic construct
  misc_feature 1..20: note = Description of Artificial Sequence: Synthetic oligonucleotide
  misc_feature 1..20: note = Target: ANGPTL3; (-) strand; PAM type: YTN; PAM sequence: TTT
  source 1..20: mol_type = other DNA
tttaaaggagacaaatagta

SEQ ID NO: 13432 - DNA, 20 bp, synthetic construct
  misc_feature 1..20: note = Description of Artificial Sequence: Synthetic oligonucleotide
  misc_feature 1..20: note = Target: ANGPTL3; (-) strand; PAM type: YTN; PAM sequence: TTG
  source 1..20: mol_type = other DNA
gaatatgttttttaaaggag

SEQ ID NO: 13433 - DNA, 20 bp, synthetic construct
  misc_feature 1..20: note = Description of Artificial Sequence: Synthetic oligonucleotide
  misc_feature 1..20: note = Target: ANGPTL3; (-) strand; PAM type: YTN; PAM sequence: TTT
  source 1..20: mol_type = other DNA
ggaatatgttttttaaagga

SEQ ID NO: 13434 - DNA, 20 bp, synthetic construct
  misc_feature 1..20: note = Description of Artificial Sequence: Synthetic oligonucleotide
  misc_feature 1..20: note = Target: ANGPTL3; (-) strand; PAM type: YTN; PAM sequence: CTA
  source 1..20: mol_type = other DNA
cagcagaaggtagagtatat

SEQ ID NO: 13435 - DNA, 20 bp, synthetic construct
  misc_feature 1..20: note = Description of Artificial Sequence: Synthetic oligonucleotide
  misc_feature 1..20: note = Target: ANGPTL3; (-) strand; PAM type: YTN; PAM sequence: TTA
  source 1..20: mol_type = other DNA
tcctacagcagaaggtagag

SEQ ID NO: 13436 - DNA, 20 bp, synthetic construct
  misc_feature 1..20: note = Description of Artificial Sequence: Synthetic oligonucleotide
  misc_feature 1..20: note = Target: ANGPTL3; (-) strand; PAM type: YTN; PAM sequence: TTG
  source 1..20: mol_type = other DNA
attatcctacagcagaaggt

SEQ ID NO: 13437 - DNA, 20 bp, synthetic construct
  misc_feature 1..20: note = Description of Artificial Sequence: Synthetic oligonucleotide
  misc_feature 1..20: note = Target: ANGPTL3; (-) strand; PAM type: YTN; PAM sequence: TTT
  source 1..20: mol_type = other DNA
gattatcctacagcagaagg

SEQ ID NO: 13438 - DNA, 20 bp, synthetic construct
  misc_feature 1..20: note = Description of Artificial Sequence: Synthetic oligonucleotide
  misc_feature 1..20: note = Target: ANGPTL3; (-) strand; PAM type: YTN; PAM sequence: TTA
  source 1..20: mol_type = other DNA
gtgatggggaaaaaaatcac

SEQ ID NO: 13439 - DNA, 20 bp, synthetic construct
  misc_feature 1..20: note = Description of Artificial Sequence: Synthetic oligonucleotide
  misc_feature 1..20: note = Target: ANGPTL3; (-) strand; PAM type: YTN; PAM sequence: CTG
  source 1..20: mol_type = other DNA
ttagtgatggggaaaaaaat

SEQ ID NO: 13440 - DNA, 20 bp, synthetic construct
  misc_feature 1..20: note = Description of Artificial Sequence: Synthetic oligonucleotide
  misc_feature 1..20: note = Target: ANGPTL3; (-) strand; PAM type: YTN; PAM sequence: TTA
  source 1..20: mol_type = other DNA
tggctgttagtgatggggaa

SEQ ID NO: 13441 - DNA, 20 bp, synthetic construct
  misc_feature 1..20: note = Description of Artificial Sequence: Synthetic oligonucleotide
  misc_feature 1..20: note = Target: ANGPTL3; (-) strand; PAM type: YTN; PAM sequence: TTT
  source 1..20: mol_type = other DNA
atggctgttagtgatgggga

SEQ ID NO: 13442 - DNA, 20 bp, synthetic construct
  misc_feature 1..20: note = Description of Artificial Sequence: Synthetic oligonucleotide
  misc_feature 1..20: note = Target: ANGPTL3; (-) strand; PAM type: YTN; PAM sequence: CTC
  source 1..20: mol_type = other DNA
agtagtacatacataagtgc

SEQ ID NO: 13443 - DNA, 20 bp, synthetic construct
  misc_feature 1..20: note = Description of Artificial Sequence: Synthetic oligonucleotide
  misc_feature 1..20: note = Target: ANGPTL3; (-) strand; PAM type: YTN; PAM sequence: TTG
  source 1..20: mol_type = other DNA
ataatcactcagtagtacat

SEQ ID NO: 13444 - DNA, 20 bp, synthetic construct
  misc_feature 1..20: note = Description of Artificial Sequence: Synthetic oligonucleotide
  misc_feature 1..20: note = Target: ANGPTL3; (-) strand; PAM type: YTN; PAM sequence: TTT
  source 1..20: mol_type = other DNA
gataatcactcagtagtaca

SEQ ID NO: 13445 - DNA, 20 bp, synthetic construct
  misc_feature 1..20: note = Description of Artificial Sequence: Synthetic oligonucleotide
  misc_feature 1..20: note = Target: ANGPTL3; (-) strand; PAM type: YTN; PAM sequence: CTG
  source 1..20: mol_type = other DNA
tgtttgataatcactcagta

SEQ ID NO: 13446 - DNA, 20 bp, synthetic construct
  misc_feature 1..20: note = Description of Artificial Sequence: Synthetic oligonucleotide
  misc_feature 1..20: note = Target: ANGPTL3; (-) strand; PAM type: YTN; PAM sequence: CTG
  source 1..20: mol_type = other DNA
ctgtgtttgataatcactca

SEQ ID NO: 13447 - DNA, 20 bp, synthetic construct
  misc_feature 1..20: note = Description of Artificial Sequence: Synthetic oligonucleotide
  misc_feature 1..20: note = Target: ANGPTL3; (-) strand; PAM type: YTN; PAM sequence: TTA
  source 1..20: mol_type = other DNA
aaactgctgtgtttgataat

SEQ ID NO: 13448 - DNA, 20 bp, synthetic construct
  misc_feature 1..20: note = Description of Artificial Sequence: Synthetic oligonucleotide
  misc_feature 1..20: note = Target: ANGPTL3; (-) strand; PAM type: YTN; PAM sequence: TTT
  source 1..20: mol_type = other DNA
aaaactgctgtgtttgataa

SEQ ID NO: 13449 - DNA, 20 bp, synthetic construct
  misc_feature 1..20: note = Description of Artificial Sequence: Synthetic oligonucleotide
  misc_feature 1..20: note = Target: ANGPTL3; (-) strand; PAM type: YTN; PAM sequence: TTT
  source 1..20: mol_type = other DNA
taaaactgctgtgtttgata

SEQ ID NO: 13450 - DNA, 20 bp, synthetic construct
  misc_feature 1..20: note = Description of Artificial Sequence: Synthetic oligonucleotide
  misc_feature 1..20: note = Target: ANGPTL3; (-) strand; PAM type: YTN; PAM sequence: TTT
  source 1..20: mol_type = other DNA
ttaaaactgctgtgtttgat

SEQ ID NO: 13451 - DNA, 20 bp, synthetic construct
  misc_feature 1..20: note = Description of Artificial Sequence: Synthetic oligonucleotide
  misc_feature 1..20: note = Target: ANGPTL3; (-) strand; PAM type: YTN; PAM sequence: TTC
  source 1..20: mol_type = other DNA
atttttaaaactgctgtgtt

SEQ ID NO: 13452 - DNA, 20 bp, synthetic construct
  misc_feature 1..20: note = Description of Artificial Sequence: Synthetic oligonucleotide
  misc_feature 1..20: note = Target: ANGPTL3; (-) strand; PAM type: YTN; PAM sequence: TTT
  source 1..20: mol_type = other DNA
catttttaaaactgctgtgt

SEQ ID NO: 13453 - DNA, 20 bp, synthetic construct
  misc_feature 1..20: note = Description of Artificial Sequence: Synthetic oligonucleotide
  misc_feature 1..20: note = Target: ANGPTL3; (-) strand; PAM type: YTN; PAM sequence: TTT
  source 1..20: mol_type = other DNA
tcatttttaaaactgctgtg

SEQ ID NO: 13454 - DNA, 20 bp, synthetic construct
  misc_feature 1..20: note = Description of Artificial Sequence: Synthetic oligonucleotide
  misc_feature 1..20: note = Target: ANGPTL3; (-) strand; PAM type: YTN; PAM sequence: CTT
  source 1..20: mol_type = other DNA
ttcatttttaaaactgctgt

SEQ ID NO: 13455 - DNA, 20 bp, synthetic construct
  misc_feature 1..20: note = Description of Artificial Sequence: Synthetic oligonucleotide
  misc_feature 1..20: note = Target: ANGPTL3; (-) strand; PAM type: YTN; PAM sequence: TTC
  source 1..20: mol_type = other DNA
ttttcatttttaaaactgct

SEQ ID NO: 13456 - DNA, 20 bp, synthetic construct
  misc_feature 1..20: note = Description of Artificial Sequence: Synthetic oligonucleotide
  misc_feature 1..20: note = Target: ANGPTL3; (-) strand; PAM type: YTN; PAM sequence: TTT
  source 1..20: mol_type = other DNA
cttttcatttttaaaactgc

SEQ ID NO: 13457 - DNA, 20 bp, synthetic construct
  misc_feature 1..20: note = Description of Artificial Sequence: Synthetic oligonucleotide
  misc_feature 1..20: note = Target: ANGPTL3; (-) strand; PAM type: YTN; PAM sequence: CTT
  source 1..20: mol_type = other DNA
tcttttcatttttaaaactg

SEQ ID NO: 13458 - DNA, 20 bp, synthetic construct
  misc_feature 1..20: note = Description of Artificial Sequence: Synthetic oligonucleotide
  misc_feature 1..20: note = Target: ANGPTL3; (-) strand; PAM type: YTN; PAM sequence: TTG
  source 1..20: mol_type = other DNA
ggtcactttcttttcatttt

SEQ ID NO: 13459 - DNA, 20 bp, synthetic construct
  misc_feature 1..20: note = Description of Artificial Sequence: Synthetic oligonucleotide
  misc_feature 1..20: note = Target: ANGPTL3; (-) strand; PAM type: YTN; PAM sequence: TTG
  source 1..20: mol_type = other DNA
ttgggtcactttcttttcat

SEQ ID NO: 13460 - DNA, 20 bp, synthetic construct
  misc_feature 1..20: note = Description of Artificial Sequence: Synthetic oligonucleotide
  misc_feature 1..20: note = Target: ANGPTL3; (-) strand; PAM type: YTN; PAM sequence: TTG
  source 1..20: mol_type = other DNA
ataaaagggccaattgttgg

SEQ ID NO: 13461 - DNA, 20 bp, synthetic construct
  misc_feature 1..20: note = Description of Artificial Sequence: Synthetic oligonucleotide
  misc_feature 1..20: note = Target: ANGPTL3; (-) strand; PAM type: YTN; PAM sequence: TTT
  source 1..20: mol_type = other DNA
gataaaagggccaattgttg

SEQ ID NO: 13462 - DNA, 20 bp, synthetic construct
  misc_feature 1..20: note = Description of Artificial Sequence: Synthetic oligonucleotide
  misc_feature 1..20: note = Target: ANGPTL3; (-) strand; PAM type: YTN; PAM sequence: CTT
  source 1..20: mol_type = other DNA
tgataaaagggccaattgtt

SEQ ID NO: 13463 - DNA, 20 bp, synthetic construct
  misc_feature 1..20: note = Description of Artificial Sequence: Synthetic oligonucleotide
  misc_feature 1..20: note = Target: ANGPTL3; (-) strand; PAM type: YTN; PAM sequence: TTG
  source 1..20: mol_type = other DNA
gactttgataaaagggccaa

SEQ ID NO: 13464 - DNA, 20 bp, synthetic construct
  misc_feature 1..20: note = Description of Artificial Sequence: Synthetic oligonucleotide
  misc_feature 1..20: note = Target: ANGPTL3; (-) strand; PAM type: YTN; PAM sequence: TTT
  source 1..20: mol_type = other DNA
ggactttgataaaagggcca

SEQ ID NO: 13465 - DNA, 20 bp, synthetic construct
  misc_feature 1..20: note = Description of Artificial Sequence: Synthetic oligonucleotide
  misc_feature 1..20: note = Target: ANGPTL3; (-) strand; PAM type: YTN; PAM sequence: CTT
  source 1..20: mol_type = other DNA
tggactttgataaaagggcc

SEQ ID NO: 13466 - DNA, 20 bp, synthetic construct
  misc_feature 1..20: note = Description of Artificial Sequence: Synthetic oligonucleotide
  misc_feature 1..20: note = Target: ANGPTL3; (-) strand; PAM type: YTN; PAM sequence: TTG
  source 1..20: mol_type = other DNA
ccatgataatactttggact

SEQ ID NO: 13467 - DNA, 20 bp, synthetic construct
  misc_feature 1..20: note = Description of Artificial Sequence: Synthetic oligonucleotide
  misc_feature 1..20: note = Target: ANGPTL3; (-) strand; PAM type: YTN; PAM sequence: TTT
  source 1..20: mol_type = other DNA
gccatgataatactttggac

SEQ ID NO: 13468 - DNA, 20 bp, synthetic construct
  misc_feature 1..20: note = Description of Artificial Sequence: Synthetic oligonucleotide
  misc_feature 1..20: note = Target: ANGPTL3; (-) strand; PAM type: YTN; PAM sequence: TTG
  source 1..20: mol_type = other DNA
atttgccatgataatacttt

SEQ ID NO: 13469 - DNA, 20 bp, synthetic construct
  misc_feature 1..20: note = Description of Artificial Sequence: Synthetic oligonucleotide
  misc_feature 1..20: note = Target: ANGPTL3; (-) strand; PAM type: YTN; PAM sequence: CTA
  source 1..20: mol_type = other DNA
gttgatttgccatgataata

SEQ ID NO: 13470 - DNA, 20 bp, synthetic construct
  misc_feature 1..20: note = Description of Artificial Sequence: Synthetic oligonucleotide
  misc_feature 1..20: note = Target: ANGPTL3; (-) strand; PAM type: YTN; PAM sequence: TTA
  source 1..20: mol_type = other DNA
ccctagttgatttgccatga

SEQ ID NO: 13471 - DNA, 20 bp, synthetic construct
  misc_feature 1..20: note = Description of Artificial Sequence: Synthetic oligonucleotide
  misc_feature 1..20: note = Target: ANGPTL3; (-) strand; PAM type: YTN; PAM sequence: TTT
  source 1..20: mol_type = other DNA
accctagttgatttgccatg

SEQ ID NO: 13472 - DNA, 20 bp, synthetic construct
  misc_feature 1..20: note = Description of Artificial Sequence: Synthetic oligonucleotide
  misc_feature 1..20: note = Target: ANGPTL3; (-) strand; PAM type: YTN; PAM sequence: TTT
  source 1..20: mol_type = other DNA
taccctagttgatttgccat

SEQ ID NO: 13473 - DNA, 20 bp, synthetic construct
  misc_feature 1..20: note = Description of Artificial Sequence: Synthetic oligonucleotide
  misc_feature 1..20: note = Target: ANGPTL3; (-) strand; PAM type: YTN; PAM sequence: TTA
  source 1..20: mol_type = other DNA
agtaattttaccctagttga

SEQ ID NO: 13474 - DNA, 20 bp, synthetic construct
  misc_feature 1..20: note = Description of Artificial Sequence: Synthetic oligonucleotide
  misc_feature 1..20: note = Target: ANGPTL3; (-) strand; PAM type: YTN; PAM sequence: CTG
  source 1..20: mol_type = other DNA
tgcaccagttaagtaatttt

SEQ ID NO: 13475 - DNA, 20 bp, synthetic construct
  misc_feature 1..20: note = Description of Artificial Sequence: Synthetic oligonucleotide
  misc_feature 1..20: note = Target: ANGPTL3; (-) strand; PAM type: YTN; PAM sequence: TTG
  source 1..20: mol_type = other DNA
aactgtgcaccagttaagta

SEQ ID NO: 13476 - DNA, 20 bp, synthetic construct
  misc_feature 1..20: note = Description of Artificial Sequence: Synthetic oligonucleotide
  misc_feature 1..20: note = Target: ANGPTL3; (-) strand; PAM type: YTN; PAM sequence: CTT
  source 1..20: mol_type = other DNA
gaactgtgcaccagttaagt

SEQ ID NO: 13477 - DNA, 20 bp, synthetic construct
  misc_feature 1..20: note = Description of Artificial Sequence: Synthetic oligonucleotide
  misc_feature 1..20: note = Target: ANGPTL3; (-) strand; PAM type: YTN; PAM sequence: TTC
  source 1..20: mol_type = other DNA
atgaccttgaactgtgcacc

SEQ ID NO: 13478 - DNA, 20 bp, synthetic construct
  misc_feature 1..20: note = Description of Artificial Sequence: Synthetic oligonucleotide
  misc_feature 1..20: note = Target: ANGPTL3; (-) strand; PAM type: YTN; PAM sequence: TTT
  source 1..20: mol_type = other DNA
catgaccttgaactgtgcac

SEQ ID NO: 13479 - DNA, 20 bp, synthetic construct
  misc_feature 1..20: note = Description of Artificial Sequence: Synthetic oligonucleotide
  misc_feature 1..20: note = Target: ANGPTL3; (-) strand; PAM type: YTN; PAM sequence: CTT
  source 1..20: mol_type = other DNA
tcatgaccttgaactgtgca

SEQ ID NO: 13480 - DNA, 20 bp, synthetic construct
  misc_feature 1..20: note = Description of Artificial Sequence: Synthetic oligonucleotide
  misc_feature 1..20: note = Target: ANGPTL3; (-) strand; PAM type: YTN; PAM sequence: CTA
  source 1..20: mol_type = other DNA
ctttcatgaccttgaactgt

SEQ ID NO: 13481 - DNA, 20 bp, synthetic construct
  misc_feature 1..20: note = Description of Artificial Sequence: Synthetic oligonucleotide
  misc_feature 1..20: note = Target: ANGPTL3; (-) strand; PAM type: YTN; PAM sequence: TTA
  source 1..20: mol_type = other DNA
gtgctactttcatgaccttg

SEQ ID NO: 13482 - DNA, 20 bp, synthetic construct
  misc_feature 1..20: note = Description of Artificial Sequence: Synthetic oligonucleotide
  misc_feature 1..20: note = Target: ANGPTL3; (-) strand; PAM type: YTN; PAM sequence: TTG
  source 1..20: mol_type = other DNA
ttagtgctactttcatgacc

SEQ ID NO: 13483 - DNA, 20 bp, synthetic construct
  misc_feature 1..20: note = Description of Artificial Sequence: Synthetic oligonucleotide
  misc_feature 1..20: note = Target: ANGPTL3; (-) strand; PAM type: YTN; PAM sequence: TTA
  source 1..20: mol_type = other DNA
taatagaggattgttagtgc

SEQ ID NO: 13484 - DNA, 20 bp, synthetic construct
  misc_feature 1..20: note = Description of Artificial Sequence: Synthetic oligonucleotide
  misc_feature 1..20: note = Target: ANGPTL3; (-) strand; PAM type: YTN; PAM sequence: TTA
  source 1..20: mol_type = other DNA
agggttataatagaggattg

SEQ ID NO: 13485 - DNA, 20 bp, synthetic construct
  misc_feature 1..20: note = Description of Artificial Sequence: Synthetic oligonucleotide
  misc_feature 1..20: note = Target: ANGPTL3; (-) strand; PAM type: YTN; PAM sequence: TTA
  source 1..20: mol_type = other DNA
ttaagggttataatagagga

SEQ ID NO: 13486 - DNA, 20 bp, synthetic construct
  misc_feature 1..20: note = Description of Artificial Sequence: Synthetic oligonucleotide
  misc_feature 1..20: note = Target: ANGPTL3; (-) strand; PAM type: YTN; PAM sequence: TTT
  source 1..20: mol_type = other DNA
attaagggttataatagagg

SEQ ID NO: 13487 - DNA, 20 bp, synthetic construct
  misc_feature 1..20: note = Description of Artificial Sequence: Synthetic oligonucleotide
  misc_feature 1..20: note = Target: ANGPTL3; (-) strand; PAM type: YTN; PAM sequence: TTT
  source 1..20: mol_type = other DNA
tattaagggttataatagag

SEQ ID NO: 13488 - DNA, 20 bp, synthetic construct
  misc_feature 1..20: note = Description of Artificial Sequence: Synthetic oligonucleotide
  misc_feature 1..20: note = Target: ANGPTL3; (-) strand; PAM type: YTN; PAM sequence: CTC
  source 1..20: mol_type = other DNA
attttattaagggttataat

SEQ ID NO: 13489 - DNA, 20 bp, synthetic construct
  misc_feature 1..20: note = Description of Artificial Sequence: Synthetic oligonucleotide
  misc_feature 1..20: note = Target: ANGPTL3; (-) strand; PAM type: YTN; PAM sequence: TTA
  source 1..20: mol_type = other DNA
aaacctcattttattaaggg

SEQ ID NO: 13490 - DNA, 20 bp, synthetic construct
  misc_feature 1..20: note = Description of Artificial Sequence: Synthetic oligonucleotide
  misc_feature 1..20: note = Target: ANGPTL3; (-) strand; PAM type: YTN; PAM sequence: CTA
  source 1..20: mol_type = other DNA
aaatgtcattaaaacctcat

SEQ ID NO: 13491 - DNA, 20 bp, synthetic construct
  misc_feature 1..20: note = Description of Artificial Sequence: Synthetic oligonucleotide
  misc_feature 1..20: note = Target: ANGPTL3; (-) strand; PAM type: YTN; PAM sequence: TTC
  source 1..20: mol_type = other DNA
ctaaaatgtcattaaaacct

SEQ ID NO: 13492 - DNA, 20 bp, synthetic construct
  misc_feature 1..20: note = Description of Artificial Sequence: Synthetic oligonucleotide
  misc_feature 1..20: note = Target: ANGPTL3; (-) strand; PAM type: YTN; PAM sequence: TTT
  source 1..20: mol_type = other DNA
cctaaaatgtcattaaaacc

SEQ ID NO: 13493 - DNA, 20 bp, synthetic construct
  misc_feature 1..20: note = Description of Artificial Sequence: Synthetic oligonucleotide
  misc_feature 1..20: note = Target: ANGPTL3; (-) strand; PAM type: YTN; PAM sequence: TTA
  source 1..20: mol_type = other DNA
tatttcctaaaatgtcatta

SEQ ID NO: 13494 - DNA, 20 bp, synthetic construct
  misc_feature 1..20: note = Description of Artificial Sequence: Synthetic oligonucleotide
  misc_feature 1..20: note = Target: ANGPTL3; (-) strand; PAM type: YTN; PAM sequence: TTT
  source 1..20: mol_type = other DNA
atatttcctaaaatgtcatt

SEQ ID NO: 13495 - DNA, 20 bp, synthetic construct
  misc_feature 1..20: note = Description of Artificial Sequence: Synthetic oligonucleotide
  misc_feature 1..20: note = Target: ANGPTL3; (-) strand; PAM type: YTN; PAM sequence: TTT
  source 1..20: mol_type = other DNA
tatatttcctaaaatgtcat

SEQ ID NO: 13496 - DNA, 20 bp, synthetic construct
  misc_feature 1..20: note = Description of Artificial Sequence: Synthetic oligonucleotide
  misc_feature 1..20: note = Target: ANGPTL3; (-) strand; PAM type: YTN; PAM sequence: TTA
  source 1..20: mol_type = other DNA
ttttatatttcctaaaatgt

SEQ ID NO: 13497 - DNA, 20 bp, synthetic construct
  misc_feature 1..20: note = Description of Artificial Sequence: Synthetic oligonucleotide
  misc_feature 1..20: note = Target: ANGPTL3; (-) strand; PAM type: YTN; PAM sequence: TTT
  source 1..20: mol_type = other DNA
attttatatttcctaaaatg

SEQ ID NO: 13498 - DNA, 20 bp, synthetic construct
  misc_feature 1..20: note = Description of Artificial Sequence: Synthetic oligonucleotide
  misc_feature 1..20: note = Target: ANGPTL3; (-) strand; PAM type: YTN; PAM sequence: TTA
  source 1..20: mol_type = other DNA
agtttattttatatttccta

SEQ ID NO: 13499 - DNA, 20 bp, synthetic construct
  misc_feature 1..20: note = Description of Artificial Sequence: Synthetic oligonucleotide
  misc_feature 1..20: note = Target: ANGPTL3; (-) strand; PAM type: YTN; PAM sequence: CTT
  source 1..20: mol_type = other DNA
aagtttattttatatttcct

SEQ ID NO: 13500 - DNA, 20 bp, synthetic construct
  misc_feature 1..20: note = Description of Artificial Sequence: Synthetic oligonucleotide
  misc_feature 1..20: note = Target: ANGPTL3; (-) strand; PAM type: YTN; PAM sequence: TTC
  source 1..20: mol_type = other DNA
ttaagtttattttatatttc

SEQ ID NO: 13501 - DNA, 20 bp, synthetic construct
  misc_feature 1..20: note = Description of Artificial Sequence: Synthetic oligonucleotide
  misc_feature 1..20: note = Target: ANGPTL3; (-) strand; PAM type: YTN; PAM sequence: TTA
  source 1..20: mol_type = other DNA
gatagaattcttaagtttat

SEQ ID NO: 13502 - DNA, 20 bp, synthetic construct
  misc_feature 1..20: note = Description of Artificial Sequence: Synthetic oligonucleotide
  misc_feature 1..20: note = Target: ANGPTL3; (-) strand; PAM type: YTN; PAM sequence: TTT
  source 1..20: mol_type = other DNA
agatagaattcttaagttta

SEQ ID NO: 13503 - DNA, 20 bp, synthetic construct
  misc_feature 1..20: note = Description of Artificial Sequence: Synthetic oligonucleotide
  misc_feature 1..20: note = Target: ANGPTL3; (-) strand; PAM type: YTN; PAM sequence: TTT
  source 1..20: mol_type = other DNA
tagatagaattcttaagttt

SEQ ID NO: 13504 - DNA, 20 bp, synthetic construct
  misc_feature 1..20: note = Description of Artificial Sequence: Synthetic oligonucleotide
  misc_feature 1..20: note = Target: ANGPTL3; (-) strand; PAM type: YTN; PAM sequence: TTG
  source 1..20: mol_type = other DNA
tattttagatagaattctta

SEQ ID NO: 13505 - DNA, 20 bp, synthetic construct
  misc_feature 1..20: note = Description of Artificial Sequence: Synthetic oligonucleotide
  misc_feature 1..20: note = Target: ANGPTL3; (-) strand; PAM type: YTN; PAM sequence: TTT
  source 1..20: mol_type = other DNA
gtattttagatagaattctt

SEQ ID NO: 13506 - DNA, 20 bp, synthetic construct
  misc_feature 1..20: note = Description of Artificial Sequence: Synthetic oligonucleotide
  misc_feature 1..20: note = Target: ANGPTL3; (-) strand; PAM type: YTN; PAM sequence: CTT
  source 1..20: mol_type = other DNA
tgtattttagatagaattct

SEQ ID NO: 13507 - DNA, 20 bp, synthetic construct
  misc_feature 1..20: note = Description of Artificial Sequence: Synthetic oligonucleotide
  misc_feature 1..20: note = Target: ANGPTL3; (-) strand; PAM type: YTN; PAM sequence: TTA
  source 1..20: mol_type = other DNA
ggaaaaacagcctttgtatt

SEQ ID NO: 13508 - DNA, 20 bp, synthetic construct
  misc_feature 1..20: note = Description of Artificial Sequence: Synthetic oligonucleotide
  misc_feature 1..20: note = Target: ANGPTL3; (-) strand; PAM type: YTN; PAM sequence: TTT
  source 1..20: mol_type = other DNA
aggaaaaacagcctttgtat

SEQ ID NO: 13509 - DNA, 20 bp, synthetic construct
  misc_feature 1..20: note = Description of Artificial Sequence: Synthetic oligonucleotide
  misc_feature 1..20: note = Target: ANGPTL3; (-) strand; PAM type: YTN; PAM sequence: CTA
  source 1..20: mol_type = other DNA
aacatgaatttaggaaaaac

SEQ ID NO: 13510 - DNA, 20 bp, synthetic construct
  misc_feature 1..20: note = Description of Artificial Sequence: Synthetic oligonucleotide
  misc_feature 1..20: note = Target: ANGPTL3; (-) strand; PAM type: YTN; PAM sequence: TTA
  source 1..20: mol_type = other DNA
ggactaaacatgaatttagg

SEQ ID NO: 13511 - DNA, 20 bp, synthetic construct
  misc_feature 1..20: note = Description of Artificial Sequence: Synthetic oligonucleotide
  misc_feature 1..20: note = Target: ANGPTL3; (-) strand; PAM type: YTN; PAM sequence: CTT
  source 1..20: mol_type = other DNA
aggactaaacatgaatttag

SEQ ID NO: 13512 - DNA, 20 bp, synthetic construct
  misc_feature 1..20: note = Description of Artificial Sequence: Synthetic oligonucleotide
  misc_feature 1..20: note = Target: ANGPTL3; (-) strand; PAM type: YTN; PAM sequence: TTC
  source 1..20: mol_type = other DNA
ttaggactaaacatgaattt

SEQ ID NO: 13513 - DNA, 20 bp, synthetic construct
  misc_feature 1..20: note = Description of Artificial Sequence: Synthetic oligonucleotide
  misc_feature 1..20: note = Target: ANGPTL3; (-) strand; PAM type: YTN; PAM sequence: CTG
  source 1..20: mol_type = other DNA
ttcttaggactaaacatgaa

SEQ ID NO: 13514 - DNA, 20 bp, synthetic construct
  misc_feature 1..20: note = Description of Artificial Sequence: Synthetic oligonucleotide
  misc_feature 1..20: note = Target: ANGPTL3; (-) strand; PAM type: YTN; PAM sequence: TTA
  source 1..20: mol_type = other DNA
gatgtatgactgttcttagg

SEQ ID NO: 13515 - DNA, 20 bp, synthetic construct
  misc_feature 1..20: note = Description of Artificial Sequence: Synthetic oligonucleotide
  misc_feature 1..20: note = Target: ANGPTL3; (-) strand; PAM type: YTN; PAM sequence: TTA
  source 1..20: mol_type = other DNA
ttagatgtatgactgttctt

SEQ ID NO: 13516 - DNA, 20 bp, synthetic construct
  misc_feature 1..20: note = Description of Artificial Sequence: Synthetic oligonucleotide
  misc_feature 1..20: note = Target: ANGPTL3; (-) strand; PAM type: YTN; PAM sequence: TTT
  source 1..20: mol_type = other DNA
attagatgtatgactgttct

SEQ ID NO: 13517 - DNA, 20 bp, synthetic construct
  misc_feature 1..20: note = Description of Artificial Sequence: Synthetic oligonucleotide
  misc_feature 1..20: note = Target: ANGPTL3; (-) strand; PAM type: YTN; PAM sequence: TTT
  source 1..20: mol_type = other DNA
tattagatgtatgactgttc

SEQ ID NO: 13518 - DNA, 20 bp, synthetic construct
  misc_feature 1..20: note = Description of Artificial Sequence: Synthetic oligonucleotide
  misc_feature 1..20: note = Target: ANGPTL3; (-) strand; PAM type: YTN; PAM sequence: TTA
  source 1..20: mol_type = other DNA
tatacccagtcattttatta

SEQ ID NO: 13519 - DNA, 20 bp, synthetic construct
  misc_feature 1..20: note = Description of Artificial Sequence: Synthetic oligonucleotide
  misc_feature 1..20: note = Target: ANGPTL3; (-) strand; PAM type: YTN; PAM sequence: TTC
  source 1..20: mol_type = other DNA
aaattatatacccagtcatt

SEQ ID NO: 13520 - DNA, 20 bp, synthetic construct
  misc_feature 1..20: note = Description of Artificial Sequence: Synthetic oligonucleotide
  misc_feature 1..20: note = Target: ANGPTL3; (-) strand; PAM type: YTN; PAM sequence: TTT
  source 1..20: mol_type = other DNA
caaattatatacccagtcat

SEQ ID NO: 13521 - DNA, 20 bp, synthetic construct
  misc_feature 1..20: note = Description of Artificial Sequence: Synthetic oligonucleotide
  misc_feature 1..20: note = Target: ANGPTL3; (-) strand; PAM type: YTN; PAM sequence: CTT
  source 1..20: mol_type = other DNA
tcaaattatatacccagtca

SEQ ID NO: 13522 - DNA, 20 bp, synthetic construct
  misc_feature 1..20: note = Description of Artificial Sequence: Synthetic oligonucleotide
  misc_feature 1..20: note = Target: ANGPTL3; (-) strand; PAM type: YTN; PAM sequence: CTC
  source 1..20: mol_type = other DNA
tttcaaattatatacccagt

SEQ ID NO: 13523 - DNA, 20 bp, synthetic construct
  misc_feature 1..20: note = Description of Artificial Sequence: Synthetic oligonucleotide
  misc_feature 1..20: note = Target: ANGPTL3; (-) strand; PAM type: YTN; PAM sequence: TTG
  source 1..20: mol_type = other DNA
ctctttcaaattatataccc

SEQ ID NO: 13524 - DNA, 20 bp, synthetic construct
  misc_feature 1..20: note = Description of Artificial Sequence: Synthetic oligonucleotide
  misc_feature 1..20: note = Target: ANGPTL3; (-) strand; PAM type: YTN; PAM sequence: TTA
  source 1..20: mol_type = other DNA
ttgctctttcaaattatata

SEQ ID NO: 13525 - DNA, 20 bp, synthetic construct
  misc_feature 1..20: note = Description of Artificial Sequence: Synthetic oligonucleotide
  misc_feature 1..20: note = Target: ANGPTL3; (-) strand; PAM type: YTN; PAM sequence: TTT
  source 1..20: mol_type = other DNA
attgctctttcaaattatat

SEQ ID NO: 13526 - DNA, 20 bp, synthetic construct
  misc_feature 1..20: note = Description of Artificial Sequence: Synthetic oligonucleotide
  misc_feature 1..20: note = Target: ANGPTL3; (-) strand; PAM type: YTN; PAM sequence: TTC
  source 1..20: mol_type = other DNA
aaggtagtaatttattgctc

SEQ ID NO: 13527 - DNA, 20 bp, synthetic construct
  misc_feature 1..20: note = Description of Artificial Sequence: Synthetic oligonucleotide
  misc_feature 1..20: note = Target: ANGPTL3; (-) strand; PAM type: YTN; PAM sequence: CTT
  source 1..20: mol_type = other DNA
caaggtagtaatttattgct

SEQ ID NO: 13528 - DNA, 20 bp, synthetic construct
  misc_feature 1..20: note = Description of Artificial Sequence: Synthetic oligonucleotide
  misc_feature 1..20: note = Target: ANGPTL3; (-) strand; PAM type: YTN; PAM sequence: TTA
  source 1..20: mol_type = other DNA
catcttcaaggtagtaattt

SEQ ID NO: 13529 - DNA, 20 bp, synthetic construct
  misc_feature 1..20: note = Description of Artificial Sequence: Synthetic oligonucleotide
  misc_feature 1..20: note = Target: ANGPTL3; (-) strand; PAM type: YTN; PAM sequence: CTT
  source 1..20: mol_type = other DNA
acatcttcaaggtagtaatt

SEQ ID NO: 13530 - DNA, 20 bp, synthetic construct
  misc_feature 1..20: note = Description of Artificial Sequence: Synthetic oligonucleotide
  misc_feature 1..20: note = Target: ANGPTL3; (-) strand; PAM type: YTN; PAM sequence: CTA
  source 1..20: mol_type = other DNA
caaccttacatcttcaaggt

SEQ ID NO: 13531 - DNA, 20 bp, synthetic construct
  misc_feature 1..20: note = Description of Artificial Sequence: Synthetic oligonucleotide
  misc_feature 1..20: note = Target: ANGPTL3; (-) strand; PAM type: YTN; PAM sequence: TTA
  source 1..20: mol_type = other DNA
agataaatagctacaacctt

SEQ ID NO: 13532 - DNA, 20 bp, synthetic construct
  misc_feature 1..20: note = Description of Artificial Sequence: Synthetic oligonucleotide
  misc_feature 1..20: note = Target: ANGPTL3; (-) strand; PAM type: YTN; PAM sequence: TTT
  source 1..20: mol_type = other DNA
aagataaatagctacaacct

SEQ ID NO: 13533 - DNA, 20 bp, synthetic construct
  misc_feature 1..20: note = Description of Artificial Sequence: Synthetic oligonucleotide
  misc_feature 1..20: note = Target: ANGPTL3; (-) strand; PAM type: YTN; PAM sequence: TTT
  source 1..20: mol_type = other DNA
taagataaatagctacaacc

SEQ ID NO: 13534 - DNA, 20 bp, synthetic construct
  misc_feature 1..20: note = Description of Artificial Sequence: Synthetic oligonucleotide
  misc_feature 1..20: note = Target: ANGPTL3; (-) strand; PAM type: YTN; PAM sequence: CTG
  source 1..20: mol_type = other DNA
tgtattttaagataaatagc

SEQ ID NO: 13535 - DNA, 20 bp, synthetic construct
  misc_feature 1..20: note = Description of Artificial Sequence: Synthetic oligonucleotide
  misc_feature 1..20: note = Target: ANGPTL3; (-) strand; PAM type: YTN; PAM sequence: TTG
  source 1..20: mol_type = other DNA
actgtgtattttaagataaa

SEQ ID NO: 13536 - DNA, 20 bp, synthetic construct
  misc_feature 1..20: note = Description of Artificial Sequence: Synthetic oligonucleotide
  misc_feature 1..20: note = Target: ANGPTL3; (-) strand; PAM type: YTN; PAM sequence: TTT
  source 1..20: mol_type = other DNA
gactgtgtattttaagataa

SEQ ID NO: 13537 - DNA, 20 bp, synthetic construct
  misc_feature 1..20: note = Description of Artificial Sequence: Synthetic oligonucleotide
  misc_feature 1..20: note = Target: ANGPTL3; (-) strand; PAM type: YTN; PAM sequence: CTG
  source 1..20: mol_type = other DNA
aggtttgactgtgtatttta

SEQ ID NO: 13538 - DNA, 20 bp, synthetic construct
  misc_feature 1..20: note = Description of Artificial Sequence: Synthetic oligonucleotide
  misc_feature 1..20: note = Target: ANGPTL3; (-) strand; PAM type: YTN; PAM sequence: TTG
  source 1..20: mol_type = other DNA
ggtgtggaaactgaggtttg

SEQ ID NO: 13539 - DNA, 20 bp, synthetic construct
  misc_feature 1..20: note = Description of Artificial Sequence: Synthetic oligonucleotide
  misc_feature 1..20: note = Target: ANGPTL3; (-) strand; PAM type: YTN; PAM sequence: CTA
  source 1..20: mol_type = other DNA
ttgggtgtggaaactgaggt

SEQ ID NO: 13540 - DNA, 20 bp, synthetic construct
  misc_feature 1..20: note = Description of Artificial Sequence: Synthetic oligonucleotide
  misc_feature 1..20: note = Target: ANGPTL3; (-) strand; PAM type: YTN; PAM sequence: TTC
  source 1..20: mol_type = other DNA
ccatctattgggtgtggaaa

SEQ ID NO: 13541 - DNA, 20 bp, synthetic construct
  misc_feature 1..20: note = Description of Artificial Sequence: Synthetic oligonucleotide
  misc_feature 1..20: note = Target: ANGPTL3; (-) strand; PAM type: YTN; PAM sequence: TTA
  source 1..20: mol_type = other DNA
ttcccatctattgggtgtgg

SEQ ID NO: 13542 - DNA, 20 bp, synthetic construct
  misc_feature 1..20: note = Description of Artificial Sequence: Synthetic oligonucleotide
  misc_feature 1..20: note = Target: ANGPTL3; (-) strand; PAM type: YTN; PAM sequence: TTA
  source 1..20: mol_type = other DNA
ttattcccatctattgggtg

SEQ ID NO: 13543 - DNA, 20 bp, synthetic construct
  misc_feature 1..20: note = Description of Artificial Sequence: Synthetic oligonucleotide
  misc_feature 1..20: note = Target: ANGPTL3; (-) strand; PAM type: YTN; PAM sequence: TTG
  source 1..20: mol_type = other DNA
acaggattattattcccatc

SEQ ID NO: 13544 - DNA, 20 bp, synthetic construct
  misc_feature 1..20: note = Description of Artificial Sequence: Synthetic oligonucleotide
  misc_feature 1..20: note = Target: ANGPTL3; (-) strand; PAM type: YTN; PAM sequence: TTT
  source 1..20: mol_type = other DNA
gacaggattattattcccat

SEQ ID NO: 13545 - DNA, 20 bp, synthetic construct
  misc_feature 1..20: note = Description of Artificial Sequence: Synthetic oligonucleotide
  misc_feature 1..20: note = Target: ANGPTL3; (-) strand; PAM type: YTN; PAM sequence: TTA
  source 1..20: mol_type = other DNA
atagatttgacaggattatt

SEQ ID NO: 13546 - DNA, 20 bp, synthetic construct
  misc_feature 1..20: note = Description of Artificial Sequence: Synthetic oligonucleotide
  misc_feature 1..20: note = Target: ANGPTL3; (-) strand; PAM type: YTN; PAM sequence: TTA
  source 1..20: mol_type = other DNA
caatcccatgaagtattaat

SEQ ID NO: 13547 - DNA, 20 bp, synthetic construct
  misc_feature 1..20: note = Description of Artificial Sequence: Synthetic oligonucleotide
  misc_feature 1..20: note = Target: ANGPTL3; (-) strand; PAM type: YTN; PAM sequence: TTG
  source 1..20: mol_type = other DNA
atgattacaatcccatgaag

SEQ ID NO: 13548 - DNA, 20 bp, synthetic construct
  misc_feature 1..20: note = Description of Artificial Sequence: Synthetic oligonucleotide
  misc_feature 1..20: note = Target: ANGPTL3; (-) strand; PAM type: YTN; PAM sequence: CTT
  source 1..20: mol_type = other DNA
gatgattacaatcccatgaa

SEQ ID NO: 13549 - DNA, 20 bp, synthetic construct
  misc_feature 1..20: note = Description of Artificial Sequence: Synthetic oligonucleotide
  misc_feature 1..20: note = Target: ANGPTL3; (-) strand; PAM type: YTN; PAM sequence: CTG
  source 1..20: mol_type = other DNA
gcttgatgattacaatccca

SEQ ID NO: 13550 - DNA, 20 bp, synthetic construct
  misc_feature 1..20: note = Description of Artificial Sequence: Synthetic oligonucleotide
  misc_feature 1..20: note = Target: ANGPTL3; (-) strand; PAM type: YTN; PAM sequence: TTA
  source 1..20: mol_type = other DNA
tctggcttgatgattacaat

SEQ ID NO: 13551 - DNA, 20 bp, synthetic construct
  misc_feature 1..20: note = Description of Artificial Sequence: Synthetic oligonucleotide
  misc_feature 1..20: note = Target: ANGPTL3; (-) strand; PAM type: YTN; PAM sequence: TTC
  source 1..20: mol_type = other DNA
aaatacattatctggcttga

SEQ ID NO: 13552 - DNA, 20 bp, synthetic construct
  misc_feature 1..20: note = Description of Artificial Sequence: Synthetic oligonucleotide
  misc_feature 1..20: note = Target: ANGPTL3; (-) strand; PAM type: YTN; PAM sequence: CTA
  source 1..20: mol_type = other DNA
ttcaaatacattatctggct

SEQ ID NO: 13553 - DNA, 20 bp, synthetic construct
  misc_feature 1..20: note = Description of Artificial Sequence: Synthetic oligonucleotide
  misc_feature 1..20: note = Target: ANGPTL3; (-) strand; PAM type: YTN; PAM sequence: TTC
  source 1..20: mol_type = other DNA
ataaagctattcaaatacat

SEQ ID NO: 13554 - DNA, 20 bp, synthetic construct
  misc_feature 1..20: note = Description of Artificial Sequence: Synthetic oligonucleotide
  misc_feature 1..20: note = Target: ANGPTL3; (-) strand; PAM type: YTN; PAM sequence: TTA
  source 1..20: mol_type = other DNA
tagttcataaagctattcaa

SEQ ID NO: 13555 - DNA, 20 bp, synthetic construct
  misc_feature 1..20: note = Description of Artificial Sequence: Synthetic oligonucleotide
  misc_feature 1..20: note = Target: ANGPTL3; (-) strand; PAM type: YTN; PAM sequence: TTT
  source 1..20: mol_type = other DNA
atagttcataaagctattca

SEQ ID NO: 13556 - DNA, 20 bp, synthetic construct
  misc_feature 1..20: note = Description of Artificial Sequence: Synthetic oligonucleotide
  misc_feature 1..20: note = Target: ANGPTL3; (-) strand; PAM type: YTN; PAM sequence: CTT
  source 1..20: mol_type = other DNA
tatagttcataaagctattc

SEQ ID NO: 13557 - DNA, 20 bp, synthetic construct
  misc_feature 1..20: note = Description of Artificial Sequence: Synthetic oligonucleotide
  misc_feature 1..20: note = Target: ANGPTL3; (-) strand; PAM type: YTN; PAM sequence: TTA
  source 1..20: mol_type = other DNA
gaactttatagttcataaag

SEQ ID NO: 13558 - DNA, 20 bp, synthetic construct
  misc_feature 1..20: note = Description of Artificial Sequence: Synthetic oligonucleotide
  misc_feature 1..20: note = Target: ANGPTL3; (-) strand; PAM type: YTN; PAM sequence: TTT
  source 1..20: mol_type = other DNA
agaactttatagttcataaa

SEQ ID NO: 13559 - DNA, 20 bp, synthetic construct
  misc_feature 1..20: note = Description of Artificial Sequence: Synthetic oligonucleotide
  misc_feature 1..20: note = Target: ANGPTL3; (-) strand; PAM type: YTN; PAM sequence: TTG
  source 1..20: mol_type = other DNA
tttagaactttatagttcat

SEQ ID NO: 13560 - DNA, 20 bp, synthetic construct
  misc_feature 1..20: note = Description of Artificial Sequence: Synthetic oligonucleotide
  misc_feature 1..20: note = Target: ANGPTL3; (-) strand; PAM type: YTN; PAM sequence: TTT
  source 1..20: mol_type = other DNA
gtttagaactttatagttca

SEQ ID NO: 13561 - DNA, 20 bp, synthetic construct
  misc_feature 1..20: note = Description of Artificial Sequence: Synthetic oligonucleotide
  misc_feature 1..20: note = Target: ANGPTL3; (-) strand; PAM type: YTN; PAM sequence: TTA
  source 1..20: mol_type = other DNA
aaaagtatatacatttgttt

SEQ ID NO: 13562 - DNA, 20 bp, synthetic construct
  misc_feature 1..20: note = Description of Artificial Sequence: Synthetic oligonucleotide
  misc_feature 1..20: note = Target: ANGPTL3; (-) strand; PAM type: YTN; PAM sequence: TTT
  source 1..20: mol_type = other DNA
aaaaagtatatacatttgtt

SEQ ID NO: 13563 - DNA, 20 bp, synthetic construct
  misc_feature 1..20: note = Description of Artificial Sequence: Synthetic oligonucleotide
  misc_feature 1..20: note = Target: ANGPTL3; (-) strand; PAM type: YTN; PAM sequence: TTT
  source 1..20: mol_type = other DNA
taaaaagtatatacatttgt

SEQ ID NO: 13564 - DNA, 20 bp, synthetic construct
  misc_feature 1..20: note = Description of Artificial Sequence: Synthetic oligonucleotide
  misc_feature 1..20: note = Target: ANGPTL3; (-) strand; PAM type: YTN; PAM sequence: TTT
  source 1..20: mol_type = other DNA
ttaaaaagtatatacatttg

SEQ ID NO: 13565 - DNA, 20 bp, synthetic construct
  misc_feature 1..20: note = Description of Artificial Sequence: Synthetic oligonucleotide
  misc_feature 1..20: note = Target: ANGPTL3; (-) strand; PAM type: YTN; PAM sequence: CTG
  source 1..20: mol_type = other DNA
tttttaaaaagtatatacat

SEQ ID NO: 13566 - DNA, 20 bp, synthetic construct
  misc_feature 1..20: note = Description of Artificial Sequence: Synthetic oligonucleotide
  misc_feature 1..20: note = Target: ANGPTL3; (-) strand; PAM type: YTN; PAM sequence: TTA
  source 1..20: mol_type = other DNA
aaggaatgtgaaaaatgaca

SEQ ID NO: 13567 - DNA, 20 bp, synthetic construct
  misc_feature 1..20: note = Description of Artificial Sequence: Synthetic oligonucleotide
  misc_feature 1..20: note = Target: ANGPTL3; (-) strand; PAM type: YTN; PAM sequence: CTT
  source 1..20: mol_type = other DNA
aaaggaatgtgaaaaatgac

SEQ ID NO: 13568 - DNA, 20 bp, synthetic construct
  misc_feature 1..20: note = Description of Artificial Sequence: Synthetic oligonucleotide
  misc_feature 1..20: note = Target: ANGPTL3; (-) strand; PAM type: YTN; PAM sequence: TTA
  source 1..20: mol_type = other DNA
cttaaaggaatgtgaaaaat

SEQ ID NO: 13569 - DNA, 20 bp, synthetic construct
  misc_feature 1..20: note = Description of Artificial Sequence: Synthetic oligonucleotide
  misc_feature 1..20: note = Target: ANGPTL3; (-) strand; PAM type: YTN; PAM sequence: TTT
  source 1..20: mol_type = other DNA
acttaaaggaatgtgaaaaa

SEQ ID NO: 13570 - DNA, 20 bp, synthetic construct
  misc_feature 1..20: note = Description of Artificial Sequence: Synthetic oligonucleotide
  misc_feature 1..20: note = Target: ANGPTL3; (-) strand; PAM type: YTN; PAM sequence: TTA
  source 1..20: mol_type = other DNA
tttacttaaaggaatgtgaa

SEQ ID NO: 13571 - DNA, 20 bp, synthetic construct
  misc_feature 1..20: note = Description of Artificial Sequence: Synthetic oligonucleotide
  misc_feature 1..20: note = Target: ANGPTL3; (-) strand; PAM type: YTN; PAM sequence: TTG
  source 1..20: mol_type = other DNA
tagagattatttacttaaag

SEQ ID NO: 13572 - DNA, 20 bp, synthetic construct
  misc_feature 1..20: note = Description of Artificial Sequence: Synthetic oligonucleotide
  misc_feature 1..20: note = Target: ANGPTL3; (-) strand; PAM type: YTN; PAM sequence: TTT
  source 1..20: mol_type = other DNA
gtagagattatttacttaaa

SEQ ID NO: 13573 - DNA, 20 bp, synthetic construct
  misc_feature 1..20: note = Description of Artificial Sequence: Synthetic oligonucleotide
  misc_feature 1..20: note = Target: ANGPTL3; (-) strand; PAM type: YTN; PAM sequence: TTA
  source 1..20: mol_type = other DNA
ggaagcgtttgtagagatta

SEQ ID NO: 13574 - DNA, 20 bp, synthetic construct
  misc_feature 1..20: note = Description of Artificial Sequence: Synthetic oligonucleotide
  misc_feature 1..20: note = Target: ANGPTL3; (-) strand; PAM type: YTN; PAM sequence: TTC
  source 1..20: mol_type = other DNA
agttaggaagcgtttgtaga

SEQ ID NO: 13575 - DNA, 20 bp, synthetic construct
  misc_feature 1..20: note = Description of Artificial Sequence: Synthetic oligonucleotide
  misc_feature 1..20: note = Target: ANGPTL3; (-) strand; PAM type: YTN; PAM sequence: TTA
  source 1..20: mol_type = other DNA
taatatgttcagttaggaag

SEQ ID NO: 13576 - DNA, 20 bp, synthetic construct
  misc_feature 1..20: note = Description of Artificial Sequence: Synthetic oligonucleotide
  misc_feature 1..20: note = Target: ANGPTL3; (-) strand; PAM type: YTN; PAM sequence: CTG
  source 1..20: mol_type = other DNA
agaattataatatgttcagt

SEQ ID NO: 13577 - DNA, 20 bp, synthetic construct
  misc_feature 1..20: note = Description of Artificial Sequence: Synthetic oligonucleotide
  misc_feature 1..20: note = Target: ANGPTL3; (-) strand; PAM type: YTN; PAM sequence: CTG
  source 1..20: mol_type = other DNA
tcctgagaattataatatgt

SEQ ID NO: 13578 - DNA, 20 bp, synthetic construct
  misc_feature 1..20: note = Description of Artificial Sequence: Synthetic oligonucleotide
  misc_feature 1..20: note = Target: ANGPTL3; (-) strand; PAM type: YTN; PAM sequence: TTC
  source 1..20: mol_type = other DNA
tgtcctgagaattataatat

SEQ ID NO: 13579 - DNA, 20 bp, synthetic construct
  misc_feature 1..20: note = Description of Artificial Sequence: Synthetic oligonucleotide
  misc_feature 1..20: note = Target: ANGPTL3; (-) strand; PAM type: YTN; PAM sequence: CTT
  source 1..20: mol_type = other DNA
ctgtcctgagaattataata

SEQ ID NO: 13580 - DNA, 20 bp, synthetic construct
  misc_feature 1..20: note = Description of Artificial Sequence: Synthetic oligonucleotide
  misc_feature 1..20: note = Target: ANGPTL3; (-) strand; PAM type: YTN; PAM sequence: TTC
  source 1..20: mol_type = other DNA
ttctgtcctgagaattataa

SEQ ID NO: 13581 - DNA, 20 bp, synthetic construct
  misc_feature 1..20: note = Description of Artificial Sequence: Synthetic oligonucleotide
  misc_feature 1..20: note = Target: ANGPTL3; (-) strand; PAM type: YTN; PAM sequence: TTG
  source 1..20: mol_type = other DNA
ttcttctgtcctgagaatta

SEQ ID NO: 13582 - DNA, 20 bp, synthetic construct
  misc_feature 1..20: note = Description of Artificial Sequence: Synthetic oligonucleotide
  misc_feature 1..20: note = Target: ANGPTL3; (-) strand; PAM type: YTN; PAM sequence: TTT
  source 1..20: mol_type = other DNA
gttcttctgtcctgagaatt

SEQ ID NO: 13583 - DNA, 20 bp, synthetic construct
  misc_feature 1..20: note = Description of Artificial Sequence: Synthetic oligonucleotide
  misc_feature 1..20: note = Target: ANGPTL3; (-) strand; PAM type: YTN; PAM sequence: TTT
  source 1..20: mol_type = other DNA
tgttcttctgtcctgagaat

SEQ ID NO: 13584 - DNA, 20 bp, synthetic construct
  misc_feature 1..20: note = Description of Artificial Sequence: Synthetic oligonucleotide
  misc_feature 1..20: note = Target: ANGPTL3; (-) strand; PAM type: YTN; PAM sequence: CTG
  source 1..20: mol_type = other DNA
agaagggcagttttgttctt

SEQ ID NO: 13585 - DNA, 20 bp, synthetic construct
  misc_feature 1..20: note = Description of Artificial Sequence: Synthetic oligonucleotide
  misc_feature 1..20: note = Target: ANGPTL3; (-) strand; PAM type: YTN; PAM sequence: CTC
  source 1..20: mol_type = other DNA
tgagaagggcagttttgttc

SEQ ID NO: 13586 - DNA, 20 bp, synthetic construct
  misc_feature 1..20: note = Description of Artificial Sequence: Synthetic oligonucleotide
  misc_feature 1..20: note = Target: ANGPTL3; (-) strand; PAM type: YTN; PAM sequence: TTC
  source 1..20: mol_type = other DNA
cagaaacagatgcaaactct

SEQ ID NO: 13587 - DNA, 20 bp, synthetic construct
  misc_feature 1..20: note = Description of Artificial Sequence: Synthetic oligonucleotide
  misc_feature 1..20: note = Target: ANGPTL3; (-) strand; PAM type: YTN; PAM sequence: TTG
  source 1..20: mol_type = other DNA
tgaagggaaggagtaaagtt

SEQ ID NO: 13588 - DNA, 20 bp, synthetic construct
  misc_feature 1..20: note = Description of Artificial Sequence: Synthetic oligonucleotide
  misc_feature 1..20: note = Target: ANGPTL3; (-) strand; PAM type: YTN; PAM sequence: TTA
  source 1..20: mol_type = other DNA
gattgtgaagggaaggagta

SEQ ID NO: 13589 - DNA, 20 bp, synthetic construct
  misc_feature 1..20: note = Description of Artificial Sequence: Synthetic oligonucleotide
  misc_feature 1..20: note = Target: ANGPTL3; (-) strand; PAM type: YTN; PAM sequence: CTT
  source 1..20: mol_type = other DNA
agattgtgaagggaaggagt

SEQ ID NO: 13590 - DNA, 20 bp, synthetic construct
  misc_feature 1..20: note = Description of Artificial Sequence: Synthetic oligonucleotide
  misc_feature 1..20: note = Target: ANGPTL3; (-) strand; PAM type: YTN; PAM sequence: TTA
  source 1..20: mol_type = other DNA
tcttagattgtgaagggaag

SEQ ID NO: 13591 - DNA, 20 bp, synthetic construct
  misc_feature 1..20: note = Description of Artificial Sequence: Synthetic oligonucleotide
  misc_feature 1..20: note = Target: ANGPTL3; (-) strand; PAM type: YTN; PAM sequence: CTG
  source 1..20: mol_type = other DNA
aaggtgatggagtgttatct

SEQ ID NO: 13592 - DNA, 20 bp, synthetic construct
  misc_feature 1..20: note = Description of Artificial Sequence: Synthetic oligonucleotide
  misc_feature 1..20: note = Target: ANGPTL3; (-) strand; PAM type: YTN; PAM sequence: TTG
  source 1..20: mol_type = other DNA
catctgaaggtgatggagtg

SEQ ID NO: 13593 - DNA, 20 bp, synthetic construct
  misc_feature 1..20: note = Description of Artificial Sequence: Synthetic oligonucleotide
  misc_feature 1..20: note = Target: ANGPTL3; (-) strand; PAM type: YTN; PAM sequence: CTT
  source 1..20: mol_type = other DNA
gcatctgaaggtgatggagt

SEQ ID NO: 13594 - DNA, 20 bp, synthetic construct
  misc_feature 1..20: note = Description of Artificial Sequence: Synthetic oligonucleotide
  misc_feature 1..20: note = Target: ANGPTL3; (-) strand; PAM type: YTN; PAM sequence: TTA
  source 1..20: mol_type = other DNA
ggggcttgcatctgaaggtg

SEQ ID NO: 13595 - DNA, 20 bp, synthetic construct
  misc_feature 1..20: note = Description of Artificial Sequence: Synthetic oligonucleotide
  misc_feature 1..20: note = Target: ANGPTL3; (-) strand; PAM type: YTN; PAM sequence: TTA
  source 1..20: mol_type = other DNA
gttaggggcttgcatctgaa

SEQ ID NO: 13596 - DNA, 20 bp, synthetic construct
  misc_feature 1..20: note = Description of Artificial Sequence: Synthetic oligonucleotide
  misc_feature 1..20: note = Target: ANGPTL3; (-) strand; PAM type: YTN; PAM sequence: TTT
  source 1..20: mol_type = other DNA
agttaggggcttgcatctga

SEQ ID NO: 13597 - DNA, 20 bp, synthetic construct
  misc_feature 1..20: note = Description of Artificial Sequence: Synthetic oligonucleotide
  misc_feature 1..20: note = Target: ANGPTL3; (-) strand; PAM type: YTN; PAM sequence: TTT
  source 1..20: mol_type = other DNA
tagttaggggcttgcatctg

SEQ ID NO: 13598 - DNA, 20 bp, synthetic construct
  misc_feature 1..20: note = Description of Artificial Sequence: Synthetic oligonucleotide
  misc_feature 1..20: note = Target: ANGPTL3; (-) strand; PAM type: YTN; PAM sequence: TTT
  source 1..20: mol_type = other DNA
ttagttaggggcttgcatct

SEQ ID NO: 13599 - DNA, 20 bp, synthetic construct
  misc_feature 1..20: note = Description of Artificial Sequence: Synthetic oligonucleotide
  misc_feature 1..20: note = Target: ANGPTL3; (-) strand; PAM type: YTN; PAM sequence: TTA
  source 1..20: mol_type = other DNA
acatagccacccagaagttt

SEQ ID NO: 13600 - DNA, 20 bp, synthetic construct
  misc_feature 1..20: note = Description of Artificial Sequence: Synthetic oligonucleotide
  misc_feature 1..20: note = Target: ANGPTL3; (-) strand; PAM type: YTN; PAM sequence: TTT
  source 1..20: mol_type = other DNA
aacatagccacccagaagtt

SEQ ID NO: 13601 - DNA, 20 bp, synthetic construct
  misc_feature 1..20: note = Description of Artificial Sequence: Synthetic oligonucleotide
  misc_feature 1..20: note = Target: ANGPTL3; (-) strand; PAM type: YTN; PAM sequence: TTT
  source 1..20: mol_type = other DNA
taacatagccacccagaagt

SEQ ID NO: 13602 - DNA, 20 bp, synthetic construct
  misc_feature 1..20: note = Description of Artificial Sequence: Synthetic oligonucleotide
  misc_feature 1..20: note = Target: ANGPTL3; (-) strand; PAM type: YTN; PAM sequence: CTA
  source 1..20: mol_type = other DNA
acattttaacatagccaccc

SEQ ID NO: 13603 - DNA, 20 bp, synthetic construct
  misc_feature 1..20: note = Description of Artificial Sequence: Synthetic oligonucleotide
  misc_feature 1..20: note = Target: ANGPTL3; (-) strand; PAM type: YTN; PAM sequence: TTC
  source 1..20: mol_type = other DNA
ctaacattttaacatagcca

SEQ ID NO: 13604 - DNA, 20 bp, synthetic construct
  misc_feature 1..20: note = Description of Artificial Sequence: Synthetic oligonucleotide
  misc_feature 1..20: note = Target: ANGPTL3; (-) strand; PAM type: YTN; PAM sequence: TTT
  source 1..20: mol_type = other DNA
cctaacattttaacatagcc

SEQ ID NO: 13605 - DNA, 20 bp, synthetic construct
  misc_feature 1..20: note = Description of Artificial Sequence: Synthetic oligonucleotide
  misc_feature 1..20: note = Target: ANGPTL3; (-) strand; PAM type: YTN; PAM sequence: CTA
  source 1..20: mol_type = other DNA
tttcctaacattttaacata

SEQ ID NO: 13606 - DNA, 20 bp, synthetic construct
  misc_feature 1..20: note = Description of Artificial Sequence: Synthetic oligonucleotide
  misc_feature 1..20: note = Target: ANGPTL3; (-) strand; PAM type: YTN; PAM sequence: CTC
  source 1..20: mol_type = other DNA
tatttcctaacattttaaca

SEQ ID NO: 13607 - DNA, 20 bp, synthetic construct
  misc_feature 1..20: note = Description of Artificial Sequence: Synthetic oligonucleotide
  misc_feature 1..20: note = Target: ANGPTL3; (-) strand; PAM type: YTN; PAM sequence: CTG
  source 1..20: mol_type = other DNA
agtcaagagctctatttcct

SEQ ID NO: 13608 - DNA, 20 bp, synthetic construct
  misc_feature 1..20: note = Description of Artificial Sequence: Synthetic oligonucleotide
  misc_feature 1..20: note = Target: ANGPTL3; (-) strand; PAM type: YTN; PAM sequence: TTC
  source 1..20: mol_type = other DNA
tgagtcaagagctctatttc

SEQ ID NO: 13609 - DNA, 20 bp, synthetic construct
  misc_feature 1..20: note = Description of Artificial Sequence: Synthetic oligonucleotide
  misc_feature 1..20: note = Target: ANGPTL3; (-) strand; PAM type: YTN; PAM sequence: CTC
  source 1..20: mol_type = other DNA
gaaaaaaaaaagaattctga

SEQ ID NO: 13610 - DNA, 20 bp, synthetic construct
  misc_feature 1..20: note = Description of Artificial Sequence: Synthetic oligonucleotide
  misc_feature 1..20: note = Target: ANGPTL3; (-) strand; PAM type: YTN; PAM sequence: CTC
  source 1..20: mol_type = other DNA
catctcgaaaaaaaaaagaa

SEQ ID NO: 13611 - DNA, 20 bp, synthetic construct
  misc_feature 1..20: note = Description of Artificial Sequence: Synthetic oligonucleotide
  misc_feature 1..20: note = Target: ANGPTL3; (-) strand; PAM type: YTN; PAM sequence: CTG
  source 1..20: mol_type = other DNA
ggtgacagagcgagactcca

SEQ ID NO: 13612 - DNA, 20 bp, synthetic construct
  misc_feature 1..20: note = Description of Artificial Sequence: Synthetic oligonucleotide
  misc_feature 1..20: note = Target: ANGPTL3; (-) strand; PAM type: YTN; PAM sequence: CTC
  source 1..20: mol_type = other DNA
cagcctgggtgacagagcga

SEQ ID NO: 13613 - DNA, 20 bp, synthetic construct
  misc_feature 1..20: note = Description of Artificial Sequence: Synthetic oligonucleotide
  misc_feature 1..20: note = Target: ANGPTL3; (-) strand; PAM type: YTN; PAM sequence: CTG
  source 1..20: mol_type = other DNA
cactccagcctgggtgacag

SEQ ID NO: 13614 - DNA, 20 bp, synthetic construct
  misc_feature 1..20: note = Description of Artificial Sequence: Synthetic oligonucleotide
  misc_feature 1..20: note = Target: ANGPTL3; (-) strand; PAM type: YTN; PAM sequence: CTG
  source 1..20: mol_type = other DNA
tgcagtgccactgcactcca

SEQ ID NO: 13615 - DNA, 20 bp, synthetic construct
  misc_feature 1..20: note = Description of Artificial Sequence: Synthetic oligonucleotide
  misc_feature 1..20: note = Target: ANGPTL3; (-) strand; PAM type: YTN; PAM sequence: CTC
  source 1..20: mol_type = other DNA
actgtgcagtgccactgcac

SEQ ID NO: 13616 - DNA, 20 bp, synthetic construct
  misc_feature 1..20: note = Description of Artificial Sequence: Synthetic oligonucleotide
  misc_feature 1..20: note = Target: ANGPTL3; (-) strand; PAM type: YTN; PAM sequence: CTC
  source 1..20: mol_type = other DNA
agctcactgtgcagtgccac

SEQ ID NO: 13617 - DNA, 20 bp, synthetic construct
  misc_feature 1..20: note = Description of Artificial Sequence: Synthetic oligonucleotide
  misc_feature 1..20: note = Target: ANGPTL3; (-) strand; PAM type: YTN; PAM sequence: CTG
  source 1..20: mol_type = other DNA
agatcactcagctcactgtg

SEQ ID NO: 13618 - DNA, 20 bp, synthetic construct
  misc_feature 1..20: note = Description of Artificial Sequence: Synthetic oligonucleotide
  misc_feature 1..20: note = Target: ANGPTL3; (-) strand; PAM type: YTN; PAM sequence: TTG
  source 1..20: mol_type = other DNA
cagagagctgagatcactca

SEQ ID NO: 13619 - DNA, 20 bp, synthetic construct
  misc_feature 1..20: note = Description of Artificial Sequence: Synthetic oligonucleotide
  misc_feature 1..20: note = Target: ANGPTL3; (-) strand; PAM type: YTN; PAM sequence: TTG
  source 1..20: mol_type = other DNA
aacccaggaggcggaggttg

SEQ ID NO: 13620 - DNA, 20 bp, synthetic construct
  misc_feature 1..20: note = Description of Artificial Sequence: Synthetic oligonucleotide
  misc_feature 1..20: note = Target: ANGPTL3; (-) strand; PAM type: YTN; PAM sequence: CTT
  source 1..20: mol_type = other DNA
gaacccaggaggcggaggtt

SEQ ID NO: 13621 - DNA, 20 bp, synthetic construct
  misc_feature 1..20: note = Description of Artificial Sequence: Synthetic oligonucleotide
  misc_feature 1..20: note = Target: ANGPTL3; (-) strand; PAM type: YTN; PAM sequence: CTG
  source 1..20: mol_type = other DNA
aggcaggagaatcacttgaa

SEQ ID NO: 13622 - DNA, 20 bp, synthetic construct
  misc_feature 1..20: note = Description of Artificial Sequence: Synthetic oligonucleotide
  misc_feature 1..20: note = Target: ANGPTL3; (-) strand; PAM type: YTN; PAM sequence: CTC
  source 1..20: mol_type = other DNA
aggagtctgaggcaggagaa

SEQ ID NO: 13623 - DNA, 20 bp, synthetic construct
  misc_feature 1..20: note = Description of Artificial Sequence: Synthetic oligonucleotide
  misc_feature 1..20: note = Target: ANGPTL3; (-) strand; PAM type: YTN; PAM sequence: CTA
  source 1..20: mol_type = other DNA
ctcaggagtctgaggcagga

SEQ ID NO: 13624 - DNA, 20 bp, synthetic construct
  misc_feature 1..20: note = Description of Artificial Sequence: Synthetic oligonucleotide
  misc_feature 1..20: note = Target: ANGPTL3; (-) strand; PAM type: YTN; PAM sequence: CTA
  source 1..20: mol_type = other DNA
gctactcaggagtctgaggc

SEQ ID NO: 13625 - DNA, 20 bp, synthetic construct
  misc_feature 1..20: note = Description of Artificial Sequence: Synthetic oligonucleotide
  misc_feature 1..20: note = Target: ANGPTL3; (-) strand; PAM type: YTN; PAM sequence: CTG
  source 1..20: mol_type = other DNA
taatcctagctactcaggag

SEQ ID NO: 13626 - DNA, 20 bp, synthetic construct
  misc_feature 1..20: note = Description of Artificial Sequence: Synthetic oligonucleotide
  misc_feature 1..20: note = Target: ANGPTL3; (-) strand; PAM type: YTN; PAM sequence: TTA
  source 1..20: mol_type = other DNA
gccaggcatggtggcacata

SEQ ID NO: 13627 - DNA, 20 bp, synthetic construct
  misc_feature 1..20: note = Description of Artificial Sequence: Synthetic oligonucleotide
  misc_feature 1..20: note = Target: ANGPTL3; (-) strand; PAM type: YTN; PAM sequence: CTA
  source 1..20: mol_type = other DNA
aaaatacaaaaattagccag

SEQ ID NO: 13628 - DNA, 20 bp, synthetic construct
  misc_feature 1..20: note = Description of Artificial Sequence: Synthetic oligonucleotide
  misc_feature 1..20: note = Target: ANGPTL3; (-) strand; PAM type: YTN; PAM sequence: CTA
  source 1..20: mol_type = other DNA
ctaaaaatacaaaaattagc

SEQ ID NO: 13629 - DNA, 20 bp, synthetic construct
  misc_feature 1..20: note = Description of Artificial Sequence: Synthetic oligonucleotide
  misc_feature 1..20: note = Target: ANGPTL3; (-) strand; PAM type: YTN; PAM sequence: CTC
  source 1..20: mol_type = other DNA
tactaaaaatacaaaaatta

SEQ ID NO: 13630 - DNA, 20 bp, synthetic construct
  misc_feature 1..20: note = Description of Artificial Sequence: Synthetic oligonucleotide
  misc_feature 1..20: note = Target: ANGPTL3; (-) strand; PAM type: YTN; PAM sequence: CTC
  source 1..20: mol_type = other DNA
cgtctctactaaaaatacaa

SEQ ID NO: 13631 - DNA, 20 bp, synthetic construct
  misc_feature 1..20: note = Description of Artificial Sequence: Synthetic oligonucleotide
  misc_feature 1..20: note = Target: ANGPTL3; (-) strand; PAM type: YTN; PAM sequence: CTG
  source 1..20: mol_type = other DNA
accaacatgatgaaactccg

SEQ ID NO: 13632 - DNA, 20 bp, synthetic construct
  misc_feature 1..20: note = Description of Artificial Sequence: Synthetic oligonucleotide
  misc_feature 1..20: note = Target: ANGPTL3; (-) strand; PAM type: YTN; PAM sequence: TTC
  source 1..20: mol_type = other DNA
gggaccagcctgaccaacat

SEQ ID NO: 13633 - DNA, 20 bp, synthetic construct
  misc_feature 1..20: note = Description of Artificial Sequence: Synthetic oligonucleotide
  misc_feature 1..20: note = Target: ANGPTL3; (-) strand; PAM type: YTN; PAM sequence: TTG
  source 1..20: mol_type = other DNA
ggaggccgaggaaggcggat

SEQ ID NO: 13634 - DNA, 20 bp, synthetic construct
  misc_feature 1..20: note = Description of Artificial Sequence: Synthetic oligonucleotide
  misc_feature 1..20: note = Target: ANGPTL3; (-) strand; PAM type: YTN; PAM sequence: TTT
  source 1..20: mol_type = other DNA
gggaggccgaggaaggcgga

SEQ ID NO: 13635 - DNA, 20 bp, synthetic construct
  misc_feature 1..20: note = Description of Artificial Sequence: Synthetic oligonucleotide
  misc_feature 1..20: note = Target: ANGPTL3; (-) strand; PAM type: YTN; PAM sequence: CTT
  source 1..20: mol_type = other DNA
tgggaggccgaggaaggcgg

SEQ ID NO: 13636 - DNA, 20 bp, synthetic construct
  misc_feature 1..20: note = Description of Artificial Sequence: Synthetic oligonucleotide
  misc_feature 1..20: note = Target: ANGPTL3; (-) strand; PAM type: YTN; PAM sequence: TTA
  source 1..20: mol_type = other DNA
gcactttgggaggccgagga

SEQ ID NO: 13637 - DNA, 20 bp, synthetic construct
  misc_feature 1..20: note = Description of Artificial Sequence: Synthetic oligonucleotide
  misc_feature 1..20: note = Target: ANGPTL3; (-) strand; PAM type: YTN; PAM sequence: CTT
  source 1..20: mol_type = other DNA
agcactttgggaggccgagg

SEQ ID NO: 13638 - DNA, 20 bp, synthetic construct
  misc_feature 1..20: note = Description of Artificial Sequence: Synthetic oligonucleotide
  misc_feature 1..20: note = Target: ANGPTL3; (-) strand; PAM type: YTN; PAM sequence: CTG
  source 1..20: mol_type = other DNA
taatcttagcactttgggag

SEQ ID NO: 13639 - DNA, 20 bp, synthetic construct
  misc_feature 1..20: note = Description of Artificial Sequence: Synthetic oligonucleotide
  misc_feature 1..20: note = Target: ANGPTL3; (-) strand; PAM type: YTN; PAM sequence: CTC
  source 1..20: mol_type = other DNA
acgcctgtaatcttagcact

SEQ ID NO: 13640 - DNA, 20 bp, synthetic construct
  misc_feature 1..20: note = Description of Artificial Sequence: Synthetic oligonucleotide
  misc_feature 1..20: note = Target: ANGPTL3; (-) strand; PAM type: YTN; PAM sequence: CTG
  source 1..20: mol_type = other DNA
ggcgcgggggctcacgcctg

SEQ ID NO: 13641 - DNA, 20 bp, synthetic construct
  misc_feature 1..20: note = Description of Artificial Sequence: Synthetic oligonucleotide
  misc_feature 1..20: note = Target: ANGPTL3; (-) strand; PAM type: YTN; PAM sequence: CTG
  source 1..20: mol_type = other DNA
agtcggctgggcgcgggggc

SEQ ID NO: 13642 - DNA, 20 bp, synthetic construct
  misc_feature 1..20: note = Description of Artificial Sequence: Synthetic oligonucleotide
  misc_feature 1..20: note = Target: ANGPTL3; (-) strand; PAM type: YTN; PAM sequence: CTA
  source 1..20: mol_type = other DNA
taaaaactgagtcggctggg

SEQ ID NO: 13643 - DNA, 20 bp, synthetic construct
  misc_feature 1..20: note = Description of Artificial Sequence: Synthetic oligonucleotide
  misc_feature 1..20: note = Target: ANGPTL3; (-) strand; PAM type: YTN; PAM sequence: TTA
  source 1..20: mol_type = other DNA
actataaaaactgagtcggc

SEQ ID NO: 13644 - DNA, 20 bp, synthetic construct
  misc_feature 1..20: note = Description of Artificial Sequence: Synthetic oligonucleotide
  misc_feature 1..20: note = Target: ANGPTL3; (-) strand; PAM type: YTN; PAM sequence: TTT
  source 1..20: mol_type = other DNA
aactataaaaactgagtcgg

SEQ ID NO: 13645 - DNA, 20 bp, synthetic construct
  misc_feature 1..20: note = Description of Artificial Sequence: Synthetic oligonucleotide
  misc_feature 1..20: note = Target: ANGPTL3; (-) strand; PAM type: YTN; PAM sequence: TTT
  source 1..20: mol_type = other DNA
taactataaaaactgagtcg

SEQ ID NO: 13646 - DNA, 20 bp, synthetic construct
  misc_feature 1..20: note = Description of Artificial Sequence: Synthetic oligonucleotide
  misc_feature 1..20: note = Target: ANGPTL3; (-) strand; PAM type: YTN; PAM sequence: TTA
  source 1..20: mol_type = other DNA
ttttaactataaaaactgag

SEQ ID NO: 13647 - DNA, 20 bp, synthetic construct
  misc_feature 1..20: note = Description of Artificial Sequence: Synthetic oligonucleotide
  misc_feature 1..20: note = Target: ANGPTL3; (-) strand; PAM type: YTN; PAM sequence: TTT
  source 1..20: mol_type = other DNA
attttaactataaaaactga

SEQ ID NO: 13648 - DNA, 20 bp, synthetic construct
  misc_feature 1..20: note = Description of Artificial Sequence: Synthetic oligonucleotide
  misc_feature 1..20: note = Target: ANGPTL3; (-) strand; PAM type: YTN; PAM sequence: CTA
  source 1..20: mol_type = other DNA
gtttattttaactataaaaa

SEQ ID NO: 13649 - DNA, 20 bp, synthetic construct
  misc_feature 1..20: note = Description of Artificial Sequence: Synthetic oligonucleotide
  misc_feature 1..20: note = Target: ANGPTL3; (-) strand; PAM type: YTN; PAM sequence: TTG
  source 1..20: mol_type = other DNA
gtcctagtttattttaacta

SEQ ID NO: 13650 - DNA, 20 bp, synthetic construct
  misc_feature 1..20: note = Description of Artificial Sequence: Synthetic oligonucleotide
  misc_feature 1..20: note = Target: ANGPTL3; (-) strand; PAM type: YTN; PAM sequence: CTA
  source 1..20: mol_type = other DNA
tcgaattggtcctagtttat

SEQ ID NO: 13651 - DNA, 20 bp, synthetic construct
  misc_feature 1..20: note = Description of Artificial Sequence: Synthetic oligonucleotide
  misc_feature 1..20: note = Target: ANGPTL3; (-) strand; PAM type: YTN; PAM sequence: TTC
  source 1..20: mol_type = other DNA
tatcgaattggtcctagttt

SEQ ID NO: 13652 - DNA, 20 bp, synthetic construct
  misc_feature 1..20: note = Description of Artificial Sequence: Synthetic oligonucleotide
  misc_feature 1..20: note = Target: ANGPTL3; (-) strand; PAM type: YTN; PAM sequence: TTA
  source 1..20: mol_type = other DNA
ttctatcgaattggtcctag

SEQ ID NO: 13653 - DNA, 20 bp, synthetic construct
  misc_feature 1..20: note = Description of Artificial Sequence: Synthetic oligonucleotide
  misc_feature 1..20: note = Target: ANGPTL3; (-) strand; PAM type: YTN; PAM sequence: TTT
  source 1..20: mol_type = other DNA
attctatcgaattggtccta

SEQ ID NO: 13654 - DNA, 20 bp, synthetic construct
  misc_feature 1..20: note = Description of Artificial Sequence: Synthetic oligonucleotide
  misc_feature 1..20: note = Target: ANGPTL3; (-) strand; PAM type: YTN; PAM sequence: TTT
  source 1..20: mol_type = other DNA
tattctatcgaattggtcct

SEQ ID NO: 13655 - DNA, 20 bp, synthetic construct
  misc_feature 1..20: note = Description of Artificial Sequence: Synthetic oligonucleotide
  misc_feature 1..20: note = Target: ANGPTL3; (-) strand; PAM type: YTN; PAM sequence: CTG
  source 1..20: mol_type = other DNA
agttttattctatcgaattg

SEQ ID NO: 13656 - DNA, 20 bp, synthetic construct
  misc_feature 1..20: note = Description of Artificial Sequence: Synthetic oligonucleotide
  misc_feature 1..20: note = Target: ANGPTL3; (-) strand; PAM type: YTN; PAM sequence: CTC
  source 1..20: mol_type = other DNA
tgagttttattctatcgaat

SEQ ID NO: 13657 - DNA, 20 bp, synthetic construct
  misc_feature 1..20: note = Description of Artificial Sequence: Synthetic oligonucleotide
  misc_feature 1..20: note = Target: ANGPTL3; (-) strand; PAM type: YTN; PAM sequence: TTA
  source 1..20: mol_type = other DNA
taccactctgagttttattc

SEQ ID NO: 13658 - DNA, 20 bp, synthetic construct
  misc_feature 1..20: note = Description of Artificial Sequence: Synthetic oligonucleotide
  misc_feature 1..20: note = Target: ANGPTL3; (-) strand; PAM type: YTN; PAM sequence: TTG
  source 1..20: mol_type = other DNA
ttataccactctgagtttta

SEQ ID NO: 13659 - DNA, 20 bp, synthetic construct
  misc_feature 1..20: note = Description of Artificial Sequence: Synthetic oligonucleotide
  misc_feature 1..20: note = Target: ANGPTL3; (-) strand; PAM type: YTN; PAM sequence: CTT
  source 1..20: mol_type = other DNA
gttataccactctgagtttt

SEQ ID NO: 13660 - DNA, 20 bp, synthetic construct
  misc_feature 1..20: note = Description of Artificial Sequence: Synthetic oligonucleotide
  misc_feature 1..20: note = Target: ANGPTL3; (-) strand; PAM type: YTN; PAM sequence: TTG
  source 1..20: mol_type = other DNA
tccttgttataccactctga

SEQ ID NO: 13661 - DNA, 20 bp, synthetic construct
  misc_feature 1..20: note = Description of Artificial Sequence: Synthetic oligonucleotide
  misc_feature 1..20: note = Target: ANGPTL3; (-) strand; PAM type: YTN; PAM sequence: TTT
  source 1..20: mol_type = other DNA
gtccttgttataccactctg

SEQ ID NO: 13662 - DNA, 20 bp, synthetic construct
  misc_feature 1..20: note = Description of Artificial Sequence: Synthetic oligonucleotide
  misc_feature 1..20: note = Target: ANGPTL3; (-) strand; PAM type: YTN; PAM sequence: TTT
  source 1..20: mol_type = other DNA
tgtccttgttataccactct

SEQ ID NO: 13663 - DNA, 20 bp, synthetic construct
  misc_feature 1..20: note = Description of Artificial Sequence: Synthetic oligonucleotide
  misc_feature 1..20: note = Target: ANGPTL3; (-) strand; PAM type: YTN; PAM sequence: TTG
  source 1..20: mol_type = other DNA
gttttgtccttgttatacca

SEQ ID NO: 13664 - DNA, 20 bp, synthetic construct
  misc_feature 1..20: note = Description of Artificial Sequence: Synthetic oligonucleotide
  misc_feature 1..20: note = Target: ANGPTL3; (-) strand; PAM type: YTN; PAM sequence: TTT
  source 1..20: mol_type = other DNA
ggttttgtccttgttatacc

SEQ ID NO: 13665 - DNA, 20 bp, synthetic construct
  misc_feature 1..20: note = Description of Artificial Sequence: Synthetic oligonucleotide
  misc_feature 1..20: note = Target: ANGPTL3; (-) strand; PAM type: YTN; PAM sequence: TTT
  source 1..20: mol_type = other DNA
tggttttgtccttgttatac

SEQ ID NO: 13666 - DNA, 20 bp, synthetic construct
  misc_feature 1..20: note = Description of Artificial Sequence: Synthetic oligonucleotide
  misc_feature 1..20: note = Target: ANGPTL3; (-) strand; PAM type: YTN; PAM sequence: CTA
  source 1..20: mol_type = other DNA
ttttggttttgtccttgtta

SEQ ID NO: 13667 - DNA, 20 bp, synthetic construct
  misc_feature 1..20: note = Description of Artificial Sequence: Synthetic oligonucleotide
  misc_feature 1..20: note = Target: ANGPTL3; (-) strand; PAM type: YTN; PAM sequence: CTG
  source 1..20: mol_type = other DNA
ctattttggttttgtccttg

SEQ ID NO: 13668 - DNA, 20 bp, synthetic construct
  misc_feature 1..20: note = Description of Artificial Sequence: Synthetic oligonucleotide
  misc_feature 1..20: note = Target: ANGPTL3; (-) strand; PAM type: YTN; PAM sequence: CTC
  source 1..20: mol_type = other DNA
tgctattttggttttgtcct

SEQ ID NO: 13669 - DNA, 20 bp, synthetic construct
  misc_feature 1..20: note = Description of Artificial Sequence: Synthetic oligonucleotide
  misc_feature 1..20: note = Target: ANGPTL3; (-) strand; PAM type: YTN; PAM sequence: CTG
  source 1..20: mol_type = other DNA
ccacatactctgctattttg

SEQ ID NO: 13670 - DNA, 20 bp, synthetic construct
  misc_feature 1..20: note = Description of Artificial Sequence: Synthetic oligonucleotide
  misc_feature 1..20: note = Target: ANGPTL3; (-) strand; PAM type: YTN; PAM sequence: CTA
  source 1..20: mol_type = other DNA
ctgccacatactctgctatt

SEQ ID NO: 13671 - DNA, 20 bp, synthetic construct
  misc_feature 1..20: note = Description of Artificial Sequence: Synthetic oligonucleotide
  misc_feature 1..20: note = Target: ANGPTL3; (-) strand; PAM type: YTN; PAM sequence: CTC
  source 1..20: mol_type = other DNA
aagctactgccacatactct

SEQ ID NO: 13672 - DNA, 20 bp, synthetic construct
  misc_feature 1..20: note = Description of Artificial Sequence: Synthetic oligonucleotide
  misc_feature 1..20: note = Target: ANGPTL3; (-) strand; PAM type: YTN; PAM sequence: TTC
  source 1..20: mol_type = other DNA
atagatgtctcaagctactg

SEQ ID NO: 13673 - DNA, 20 bp, synthetic construct
  misc_feature 1..20: note = Description of Artificial Sequence: Synthetic oligonucleotide
  misc_feature 1..20: note = Target: ANGPTL3; (-) strand; PAM type: YTN; PAM sequence: TTA
  source 1..20: mol_type = other DNA
gagttcatagatgtctcaag

SEQ ID NO: 13674 - DNA, 20 bp, synthetic construct
  misc_feature 1..20: note = Description of Artificial Sequence: Synthetic oligonucleotide
  misc_feature 1..20: note = Target: ANGPTL3; (-) strand; PAM type: YTN; PAM sequence: TTT
  source 1..20: mol_type = other DNA
agagttcatagatgtctcaa

SEQ ID NO: 13675 - DNA, 20 bp, synthetic construct
  misc_feature 1..20: note = Description of Artificial Sequence: Synthetic oligonucleotide
  misc_feature 1..20: note = Target: ANGPTL3; (-) strand; PAM type: YTN; PAM sequence: TTT
  source 1..20: mol_type = other DNA
tagagttcatagatgtctca

SEQ ID NO: 13676 - DNA, 20 bp, synthetic construct
  misc_feature 1..20: note = Description of Artificial Sequence: Synthetic oligonucleotide
  misc_feature 1..20: note = Target: ANGPTL3; (-) strand; PAM type: YTN; PAM sequence: TTT
  source 1..20: mol_type = other DNA
ttagagttcatagatgtctc

SEQ ID NO: 13677 - DNA, 20 bp, synthetic construct
  misc_feature 1..20: note = Description of Artificial Sequence: Synthetic oligonucleotide
  misc_feature 1..20: note = Target: ANGPTL3; (-) strand; PAM type: YTN; PAM sequence: TTA
  source 1..20: mol_type = other DNA
tttttagagttcatagatgt

SEQ ID NO: 13678 - DNA, 20 bp, synthetic construct
  misc_feature 1..20: note = Description of Artificial Sequence: Synthetic oligonucleotide
  misc_feature 1..20: note = Target: ANGPTL3; (-) strand; PAM type: YTN; PAM sequence: TTT
  source 1..20: mol_type = other DNA
atttttagagttcatagatg

SEQ ID NO: 13679 - DNA, 20 bp, synthetic construct
  misc_feature 1..20: note = Description of Artificial Sequence: Synthetic oligonucleotide
  misc_feature 1..20: note = Target: ANGPTL3; (-) strand; PAM type: YTN; PAM sequence: TTT
  source 1..20: mol_type = other DNA
tatttttagagttcatagat

SEQ ID NO: 13680 - DNA, 20 bp, synthetic construct
  misc_feature 1..20: note = Description of Artificial Sequence: Synthetic oligonucleotide
  misc_feature 1..20: note = Target: ANGPTL3; (-) strand; PAM type: YTN; PAM sequence: TTT
  source 1..20: mol_type = other DNA
ttatttttagagttcataga

SEQ ID NO: 13681 - DNA, 20 bp, synthetic construct
  misc_feature 1..20: note = Description of Artificial Sequence: Synthetic oligonucleotide
  misc_feature 1..20: note = Target: ANGPTL3; (-) strand; PAM type: YTN; PAM sequence: TTG
  source 1..20: mol_type = other DNA
tttttatttttagagttcat

SEQ ID NO: 13682 - DNA, 20 bp, synthetic construct
  misc_feature 1..20: note = Description of Artificial Sequence: Synthetic oligonucleotide
  misc_feature 1..20: note = Target: ANGPTL3; (-) strand; PAM type: YTN; PAM sequence: TTT
  source 1..20: mol_type = other DNA
gtttttatttttagagttca

SEQ ID NO: 13683 - DNA, 20 bp, synthetic construct
  misc_feature 1..20: note = Description of Artificial Sequence: Synthetic oligonucleotide
  misc_feature 1..20: note = Target: ANGPTL3; (-) strand; PAM type: YTN; PAM sequence: TTT
  source 1..20: mol_type = other DNA
tgtttttatttttagagttc

SEQ ID NO: 13684 - DNA, 20 bp, synthetic construct
  misc_feature 1..20: note = Description of Artificial Sequence: Synthetic oligonucleotide
  misc_feature 1..20: note = Target: ANGPTL3; (-) strand; PAM type: YTN; PAM sequence: TTT
  source 1..20: mol_type = other DNA
ttgtttttatttttagagtt

SEQ ID NO: 13685 - DNA, 20 bp, synthetic construct
  misc_feature 1..20: note = Description of Artificial Sequence: Synthetic oligonucleotide
  misc_feature 1..20: note = Target: ANGPTL3; (-) strand; PAM type: YTN; PAM sequence: TTG
  source 1..20: mol_type = other DNA
gtttttgtttttatttttag

SEQ ID NO: 13686 - DNA, 20 bp, synthetic construct
  misc_feature 1..20: note = Description of Artificial Sequence: Synthetic oligonucleotide
  misc_feature 1..20: note = Target: ANGPTL3; (-) strand; PAM type: YTN; PAM sequence: TTC
  source 1..20: mol_type = other DNA
agaaagtattggtttttgtt

SEQ ID NO: 13687 - DNA, 20 bp, synthetic construct
  misc_feature 1..20: note = Description of Artificial Sequence: Synthetic oligonucleotide
  misc_feature 1..20: note = Target: ANGPTL3; (-) strand; PAM type: YTN; PAM sequence: CTT
  source 1..20: mol_type = other DNA
cagaaagtattggtttttgt

SEQ ID NO: 13688 - DNA, 20 bp, synthetic construct
  misc_feature 1..20: note = Description of Artificial Sequence: Synthetic oligonucleotide
  misc_feature 1..20: note = Target: ANGPTL3; (-) strand; PAM type: YTN; PAM sequence: CTG
  source 1..20: mol_type = other DNA
cttcagaaagtattggtttt

SEQ ID NO: 13689 - DNA, 20 bp, synthetic construct
  misc_feature 1..20: note = Description of Artificial Sequence: Synthetic oligonucleotide
  misc_feature 1..20: note = Target: ANGPTL3; (-) strand; PAM type: YTN; PAM sequence: CTC
  source 1..20: mol_type = other DNA
tgcttcagaaagtattggtt

SEQ ID NO: 13690 - DNA, 20 bp, synthetic construct
  misc_feature 1..20: note = Description of Artificial Sequence: Synthetic oligonucleotide
  misc_feature 1..20: note = Target: ANGPTL3; (-) strand; PAM type: YTN; PAM sequence: TTC
  source 1..20: mol_type = other DNA
tctgcttcagaaagtattgg

SEQ ID NO: 13691 - DNA, 20 bp, synthetic construct
  misc_feature 1..20: note = Description of Artificial Sequence: Synthetic oligonucleotide
  misc_feature 1..20: note = Target: ANGPTL3; (-) strand; PAM type: YTN; PAM sequence: TTC
  source 1..20: mol_type = other DNA
aagtgtatggttctctgctt

SEQ ID NO: 13692 - DNA, 20 bp, synthetic construct
  misc_feature 1..20: note = Description of Artificial Sequence: Synthetic oligonucleotide
  misc_feature 1..20: note = Target: ANGPTL3; (-) strand; PAM type: YTN; PAM sequence: CTA
  source 1..20: mol_type = other DNA
ttcaagtgtatggttctctg

SEQ ID NO: 13693 - DNA, 20 bp, synthetic construct
  misc_feature 1..20: note = Description of Artificial Sequence: Synthetic oligonucleotide
  misc_feature 1..20: note = Target: ANGPTL3; (-) strand; PAM type: YTN; PAM sequence: TTC
  source 1..20: mol_type = other DNA
tattcaagtgtatggttctc

SEQ ID NO: 13694 - DNA, 20 bp, synthetic construct
  misc_feature 1..20: note = Description of Artificial Sequence: Synthetic oligonucleotide
  misc_feature 1..20: note = Target: ANGPTL3; (-) strand; PAM type: YTN; PAM sequence: TTT
  source 1..20: mol_type = other DNA
ctattcaagtgtatggttct

SEQ ID NO: 13695 - DNA, 20 bp, synthetic construct
  misc_feature 1..20: note = Description of Artificial Sequence: Synthetic oligonucleotide
  misc_feature 1..20: note = Target: ANGPTL3; (-) strand; PAM type: YTN; PAM sequence: TTT
  source 1..20: mol_type = other DNA
tctattcaagtgtatggttc

SEQ ID NO: 13696 - DNA, 20 bp, synthetic construct
  misc_feature 1..20: note = Description of Artificial Sequence: Synthetic oligonucleotide
  misc_feature 1..20: note = Target: ANGPTL3; (-) strand; PAM type: YTN; PAM sequence: TTT
  source 1..20: mol_type = other DNA
ttctattcaagtgtatggtt

SEQ ID NO: 13697 - DNA, 20 bp, synthetic construct
  misc_feature 1..20: note = Description of Artificial Sequence: Synthetic oligonucleotide
  misc_feature 1..20: note = Target: ANGPTL3; (-) strand; PAM type: YTN; PAM sequence: TTT
  source 1..20: mol_type = other DNA
tttctattcaagtgtatggt

SEQ ID NO: 13698 - DNA, 20 bp, synthetic construct
  misc_feature 1..20: note = Description of Artificial Sequence: Synthetic oligonucleotide
  misc_feature 1..20: note = Target: ANGPTL3; (-) strand; PAM type: YTN; PAM sequence: TTT
  source 1..20: mol_type = other DNA
ttttctattcaagtgtatgg

SEQ ID NO: 13699 - DNA, 20 bp, synthetic construct
  misc_feature 1..20: note = Description of Artificial Sequence: Synthetic oligonucleotide
  misc_feature 1..20: note = Target: ANGPTL3; (-) strand; PAM type: YTN; PAM sequence: TTT
  source 1..20: mol_type = other DNA
tttttctattcaagtgtatg

SEQ ID NO: 13700 - DNA, 20 bp, synthetic construct
  misc_feature 1..20: note = Description of Artificial Sequence: Synthetic oligonucleotide
  misc_feature 1..20: note = Target: ANGPTL3; (-) strand; PAM type: YTN; PAM sequence: TTT
  source 1..20: mol_type = other DNA
ttttttctattcaagtgtat

SEQ ID NO: 13701 - DNA, 20 bp, synthetic construct
  misc_feature 1..20: note = Description of Artificial Sequence: Synthetic oligonucleotide
  misc_feature 1..20: note = Target: ANGPTL3; (-) strand; PAM type: YTN; PAM sequence: TTC
  source 1..20: mol_type = other DNA
aggagcatttttttttctat

SEQ ID NO: 13702 - DNA, 20 bp, synthetic construct
  misc_feature 1..20: note = Description of Artificial Sequence: Synthetic oligonucleotide
  misc_feature 1..20: note = Target: ANGPTL3; (-) strand; PAM type: YTN; PAM sequence: CTG
  source 1..20: mol_type = other DNA
aaaattcaggagcatttttt

SEQ ID NO: 13703 - DNA, 20 bp, synthetic construct
  misc_feature 1..20: note = Description of Artificial Sequence: Synthetic oligonucleotide
  misc_feature 1..20: note = Target: ANGPTL3; (-) strand; PAM type: YTN; PAM sequence: TTA
  source 1..20: mol_type = other DNA
ctgaaaattcaggagcattt

SEQ ID NO: 13704 - DNA, 20 bp, synthetic construct
  misc_feature 1..20: note = Description of Artificial Sequence: Synthetic oligonucleotide
  misc_feature 1..20: note = Target: ANGPTL3; (-) strand; PAM type: YTN; PAM sequence: CTG
  source 1..20: mol_type = other DNA
aacgttactgaaaattcagg

SEQ ID NO: 13705 - DNA, 20 bp, synthetic construct
  misc_feature 1..20: note = Description of Artificial Sequence: Synthetic oligonucleotide
  misc_feature 1..20: note = Target: ANGPTL3; (-) strand; PAM type: YTN; PAM sequence: TTC
  source 1..20: mol_type = other DNA
agctgaacgttactgaaaat

SEQ ID NO: 13706 - DNA, 20 bp, synthetic construct
  misc_feature 1..20: note = Description of Artificial Sequence: Synthetic oligonucleotide
  misc_feature 1..20: note = Target: ANGPTL3; (-) strand; PAM type: YTN; PAM sequence: TTT
  source 1..20: mol_type = other DNA
cagctgaacgttactgaaaa

SEQ ID NO: 13707 - DNA, 20 bp, synthetic construct
  misc_feature 1..20: note = Description of Artificial Sequence: Synthetic oligonucleotide
  misc_feature 1..20: note = Target: ANGPTL3; (-) strand; PAM type: YTN; PAM sequence: TTA
  source 1..20: mol_type = other DNA
aggaagtataaatttcagct

SEQ ID NO: 13708 - DNA, 20 bp, synthetic construct
  misc_feature 1..20: note = Description of Artificial Sequence: Synthetic oligonucleotide
  misc_feature 1..20: note = Target: ANGPTL3; (-) strand; PAM type: YTN; PAM sequence: TTT
  source 1..20: mol_type = other DNA
aaggaagtataaatttcagc

SEQ ID NO: 13709 - DNA, 20 bp, synthetic construct
  misc_feature 1..20: note = Description of Artificial Sequence: Synthetic oligonucleotide
  misc_feature 1..20: note = Target: ANGPTL3; (-) strand; PAM type: YTN; PAM sequence: TTC
  source 1..20: mol_type = other DNA
ataatttaaggaagtataaa

SEQ ID NO: 13710 - DNA, 20 bp, synthetic construct
  misc_feature 1..20: note = Description of Artificial Sequence: Synthetic oligonucleotide
  misc_feature 1..20: note = Target: ANGPTL3; (-) strand; PAM type: YTN; PAM sequence: CTA
  source 1..20: mol_type = other DNA
cattcataatttaaggaagt

SEQ ID NO: 13711 - DNA, 20 bp, synthetic construct
  misc_feature 1..20: note = Description of Artificial Sequence: Synthetic oligonucleotide
  misc_feature 1..20: note = Target: ANGPTL3; (-) strand; PAM type: YTN; PAM sequence: TTA
  source 1..20: mol_type = other DNA
ctacattcataatttaagga

SEQ ID NO: 13712 - DNA, 20 bp, synthetic construct
  misc_feature 1..20: note = Description of Artificial Sequence: Synthetic oligonucleotide
  misc_feature 1..20: note = Target: ANGPTL3; (-) strand; PAM type: YTN; PAM sequence: TTT
  source 1..20: mol_type = other DNA
actacattcataatttaagg

SEQ ID NO: 13713 - DNA, 20 bp, synthetic construct
  misc_feature 1..20: note = Description of Artificial Sequence: Synthetic oligonucleotide
  misc_feature 1..20: note = Target: ANGPTL3; (-) strand; PAM type: YTN; PAM sequence: TTG
  source 1..20: mol_type = other DNA
gtttactacattcataattt

SEQ ID NO: 13714 - DNA, 20 bp, synthetic construct
  misc_feature 1..20: note = Description of Artificial Sequence: Synthetic oligonucleotide
  misc_feature 1..20: note = Target: ANGPTL3; (-) strand; PAM type: YTN; PAM sequence: CTG
  source 1..20: mol_type = other DNA
tggttggtttactacattca

SEQ ID NO: 13715 - DNA, 20 bp, synthetic construct
  misc_feature 1..20: note = Description of Artificial Sequence: Synthetic oligonucleotide
  misc_feature 1..20: note = Target: ANGPTL3; (-) strand; PAM type: YTN; PAM sequence: CTG
  source 1..20: mol_type = other DNA
ctgtggttggtttactacat

SEQ ID NO: 13716 - DNA, 20 bp, synthetic construct
  misc_feature 1..20: note = Description of Artificial Sequence: Synthetic oligonucleotide
  misc_feature 1..20: note = Target: ANGPTL3; (-) strand; PAM type: YTN; PAM sequence: CTG
  source 1..20: mol_type = other DNA
gtaatactgctgtggttggt

SEQ ID NO: 13717 - DNA, 20 bp, synthetic construct
  misc_feature 1..20: note = Description of Artificial Sequence: Synthetic oligonucleotide
  misc_feature 1..20: note = Target: ANGPTL3; (-) strand; PAM type: YTN; PAM sequence: TTA
  source 1..20: mol_type = other DNA
tatactggtaatactgctgt

SEQ ID NO: 13718 - DNA, 20 bp, synthetic construct
  misc_feature 1..20: note = Description of Artificial Sequence: Synthetic oligonucleotide
  misc_feature 1..20: note = Target: ANGPTL3; (-) strand; PAM type: YTN; PAM sequence: CTT
  source 1..20: mol_type = other DNA
atatactggtaatactgctg

SEQ ID NO: 13719 - DNA, 20 bp, synthetic construct
  misc_feature 1..20: note = Description of Artificial Sequence: Synthetic oligonucleotide
  misc_feature 1..20: note = Target: ANGPTL3; (-) strand; PAM type: YTN; PAM sequence: TTA
  source 1..20: mol_type = other DNA
atgacaaaatcttatatact

SEQ ID NO: 13720 - DNA, 20 bp, synthetic construct
  misc_feature 1..20: note = Description of Artificial Sequence: Synthetic oligonucleotide
  misc_feature 1..20: note = Target: ANGPTL3; (-) strand; PAM type: YTN; PAM sequence: CTA
  source 1..20: mol_type = other DNA
ttaatgacaaaatcttatat

SEQ ID NO: 13721 - DNA, 20 bp, synthetic construct
  misc_feature 1..20: note = Description of Artificial Sequence: Synthetic oligonucleotide
  misc_feature 1..20: note = Target: ANGPTL3; (-) strand; PAM type: YTN; PAM sequence: TTC
  source 1..20: mol_type = other DNA
tattaatgacaaaatcttat

SEQ ID NO: 13722 - DNA, 20 bp, synthetic construct
  misc_feature 1..20: note = Description of Artificial Sequence: Synthetic oligonucleotide
  misc_feature 1..20: note = Target: ANGPTL3; (-) strand; PAM type: YTN; PAM sequence: TTT
  source 1..20: mol_type = other DNA
ctattaatgacaaaatctta

SEQ ID NO: 13723 - DNA, 20 bp, synthetic construct
  misc_feature 1..20: note = Description of Artificial Sequence: Synthetic oligonucleotide
  misc_feature 1..20: note = Target: ANGPTL3; (-) strand; PAM type: YTN; PAM sequence: TTA
  source 1..20: mol_type = other DNA
aagtataataataataataa

SEQ ID NO: 13724 - DNA, 20 bp, synthetic construct
  misc_feature 1..20: note = Description of Artificial Sequence: Synthetic oligonucleotide
  misc_feature 1..20: note = Target: ANGPTL3; (-) strand; PAM type: YTN; PAM sequence: CTT
  source 1..20: mol_type = other DNA
aaagtataataataataata

SEQ ID NO: 13725 - DNA, 20 bp, synthetic construct
  misc_feature 1..20: note = Description of Artificial Sequence: Synthetic oligonucleotide
  misc_feature 1..20: note = Target: ANGPTL3; (-) strand; PAM type: YTN; PAM sequence: CTG
  source 1..20: mol_type = other DNA
cgcatgtatcccagaactta

SEQ ID NO: 13726 - DNA, 20 bp, synthetic construct
  misc_feature 1..20: note = Description of Artificial Sequence: Synthetic oligonucleotide
  misc_feature 1..20: note = Target: ANGPTL3; (-) strand; PAM type: YTN; PAM sequence: TTC
  source 1..20: mol_type = other DNA
tgcgcatgtatcccagaact

SEQ ID NO: 13727 - DNA, 20 bp, synthetic construct
  misc_feature 1..20: note = Description of Artificial Sequence: Synthetic oligonucleotide
  misc_feature 1..20: note = Target: ANGPTL3; (-) strand; PAM type: YTN; PAM sequence: CTG
  source 1..20: mol_type = other DNA
cacgttctgcgcatgtatcc

SEQ ID NO: 13728 - DNA, 20 bp, synthetic construct
  misc_feature 1..20: note = Description of Artificial Sequence: Synthetic oligonucleotide
  misc_feature 1..20: note = Target: ANGPTL3; (-) strand; PAM type: YTN; PAM sequence: CTA
  source 1..20: mol_type = other DNA
tgtaacaaaactgcacgttc

SEQ ID NO: 13729 - DNA, 20 bp, synthetic construct
  misc_feature 1..20: note = Description of Artificial Sequence: Synthetic oligonucleotide
  misc_feature 1..20: note = Target: ANGPTL3; (-) strand; PAM type: YTN; PAM sequence: TTG
  source 1..20: mol_type = other DNA
atgggtgcagcaaaccacca

SEQ ID NO: 13730 - DNA, 20 bp, synthetic construct
  misc_feature 1..20: note = Description of Artificial Sequence: Synthetic oligonucleotide
  misc_feature 1..20: note = Target: ANGPTL3; (-) strand; PAM type: YTN; PAM sequence: CTA
  source 1..20: mol_type = other DNA
atgtagatgacgggttgatg

SEQ ID NO: 13731 - DNA, 20 bp, synthetic construct
  misc_feature 1..20: note = Description of Artificial Sequence: Synthetic oligonucleotide
  misc_feature 1..20: note = Target: ANGPTL3; (-) strand; PAM type: YTN; PAM sequence: TTA
  source 1..20: mol_type = other DNA
ggagaaatacctaatgtaga

SEQ ID NO: 13732 - DNA, 20 bp, synthetic construct
  misc_feature 1..20: note = Description of Artificial Sequence: Synthetic oligonucleotide
  misc_feature 1..20: note = Target: ANGPTL3; (-) strand; PAM type: YTN; PAM sequence: CTA
  source 1..20: mol_type = other DNA
ggggagggatagcattagga

SEQ ID NO: 13733 - DNA, 20 bp, synthetic construct
  misc_feature 1..20: note = Description of Artificial Sequence: Synthetic oligonucleotide
  misc_feature 1..20: note = Target: ANGPTL3; (-) strand; PAM type: YTN; PAM sequence: CTG
  source 1..20: mol_type = other DNA
tcggggtggggctaggggag

SEQ ID NO: 13734 - DNA, 20 bp, synthetic construct
  misc_feature 1..20: note = Description of Artificial Sequence: Synthetic oligonucleotide
  misc_feature 1..20: note = Target: ANGPTL3; (-) strand; PAM type: YTN; PAM sequence: CTG
  source 1..20: mol_type = other DNA
ggacctgtcggggtggggct

SEQ ID NO: 13735 - DNA, 20 bp, synthetic construct
  misc_feature 1..20: note = Description of Artificial Sequence: Synthetic oligonucleotide
  misc_feature 1..20: note = Target: ANGPTL3; (-) strand; PAM type: YTN; PAM sequence: CTA
  source 1..20: mol_type = other DNA
aacaatgagaacacatggac

SEQ ID NO: 13736 - DNA, 20 bp, synthetic construct
  misc_feature 1..20: note = Description of Artificial Sequence: Synthetic oligonucleotide
  misc_feature 1..20: note = Target: ANGPTL3; (-) strand; PAM type: YTN; PAM sequence: CTC
  source 1..20: mol_type = other DNA
ataagtgggagctaaacaat

SEQ ID NO: 13737 - DNA, 20 bp, synthetic construct
  misc_feature 1..20: note = Description of Artificial Sequence: Synthetic oligonucleotide
  misc_feature 1..20: note = Target: ANGPTL3; (-) strand; PAM type: YTN; PAM sequence: CTC
  source 1..20: mol_type = other DNA
actcataagtgggagctaaa

SEQ ID NO: 13738 - DNA, 20 bp, synthetic construct
  misc_feature 1..20: note = Description of Artificial Sequence: Synthetic oligonucleotide
  misc_feature 1..20: note = Target: ANGPTL3; (-) strand; PAM type: YTN; PAM sequence: TTC
  source 1..20: mol_type = other DNA
tcactcataagtgggagcta

SEQ ID NO: 13739 - DNA, 20 bp, synthetic construct
  misc_feature 1..20: note = Description of Artificial Sequence: Synthetic oligonucleotide
  misc_feature 1..20: note = Target: ANGPTL3; (-) strand; PAM type: YTN; PAM sequence: CTA
  source 1..20: mol_type = other DNA
acacaggaacagaaaaccaa

SEQ ID NO: 13740 - DNA, 20 bp, synthetic construct
  misc_feature 1..20: note = Description of Artificial Sequence: Synthetic oligonucleotide
  misc_feature 1..20: note = Target: ANGPTL3; (-) strand; PAM type: YTN; PAM sequence: CTC
  source 1..20: mol_type = other DNA
agcaaactaacacaggaaca

SEQ ID NO: 13741 - DNA, 20 bp, synthetic construct
  misc_feature 1..20: note = Description of Artificial Sequence: Synthetic oligonucleotide
  misc_feature 1..20: note = Target: ANGPTL3; (-) strand; PAM type: YTN; PAM sequence: TTC
  source 1..20: mol_type = other DNA
tcagcaaactaacacaggaa

SEQ ID NO: 13742 - DNA, 20 bp, synthetic construct
  misc_feature 1..20: note = Description of Artificial Sequence: Synthetic oligonucleotide
  misc_feature 1..20: note = Target: ANGPTL3; (-) strand; PAM type: YTN; PAM sequence: CTG
  source 1..20: mol_type = other DNA
gaaaccatcattctcagcaa

SEQ ID NO: 13743 - DNA, 20 bp, synthetic construct
  misc_feature 1..20: note = Description of Artificial Sequence: Synthetic oligonucleotide
  misc_feature 1..20: note = Target: ANGPTL3; (-) strand; PAM type: YTN; PAM sequence: TTG
  source 1..20: mol_type = other DNA
tagggacatggatgaagctg

SEQ ID NO: 13744 - DNA, 20 bp, synthetic construct
  misc_feature 1..20: note = Description of Artificial Sequence: Synthetic oligonucleotide
  misc_feature 1..20: note = Target: ANGPTL3; (-) strand; PAM type: YTN; PAM sequence: TTT
  source 1..20: mol_type = other DNA
gtagggacatggatgaagct

SEQ ID NO: 13745 - DNA, 20 bp, synthetic construct
  misc_feature 1..20: note = Description of Artificial Sequence: Synthetic oligonucleotide
  misc_feature 1..20: note = Target: ANGPTL3; (-) strand; PAM type: YTN; PAM sequence: CTT
  source 1..20: mol_type = other DNA
tgtagggacatggatgaagc

SEQ ID NO: 13746 - DNA, 20 bp, synthetic construct
  misc_feature 1..20: note = Description of Artificial Sequence: Synthetic oligonucleotide
  misc_feature 1..20: note = Target: ANGPTL3; (-) strand; PAM type: YTN; PAM sequence: TTC
  source 1..20: mol_type = other DNA
atgtcctttgtagggacatg

SEQ ID NO: 13747 - DNA, 20 bp, synthetic construct
  misc_feature 1..20: note = Description of Artificial Sequence: Synthetic oligonucleotide
  misc_feature 1..20: note = Target: ANGPTL3; (-) strand; PAM type: YTN; PAM sequence: CTA
  source 1..20: mol_type = other DNA
tgcagccataaaaaaggatg

SEQ ID NO: 13748 - DNA, 20 bp, synthetic construct
  misc_feature 1..20: note = Description of Artificial Sequence: Synthetic oligonucleotide
  misc_feature 1..20: note = Target: ANGPTL3; (-) strand; PAM type: YTN; PAM sequence: CTG
  source 1..20: mol_type = other DNA
gatgaagaaaatgtggcaca

SEQ ID NO: 13749 - DNA, 20 bp, synthetic construct
  misc_feature 1..20: note = Description of Artificial Sequence: Synthetic oligonucleotide
  misc_feature 1..20: note = Target: ANGPTL3; (-) strand; PAM type: YTN; PAM sequence: TTG
  source 1..20: mol_type = other DNA
gaaccaacccaaatgcccat

SEQ ID NO: 13750 - DNA, 20 bp, synthetic construct
  misc_feature 1..20: note = Description of Artificial Sequence: Synthetic oligonucleotide
  misc_feature 1..20: note = Target: ANGPTL3; (-) strand; PAM type: YTN; PAM sequence: CTT
  source 1..20: mol_type = other DNA
ggaaccaacccaaatgccca

SEQ ID NO: 13751 - DNA, 20 bp, synthetic construct
  misc_feature 1..20: note = Description of Artificial Sequence: Synthetic oligonucleotide
  misc_feature 1..20: note = Target: ANGPTL3; (-) strand; PAM type: YTN; PAM sequence: TTC
  source 1..20: mol_type = other DNA
acaataacaaagacttggaa

SEQ ID NO: 13752 - DNA, 20 bp, synthetic construct
  misc_feature 1..20: note = Description of Artificial Sequence: Synthetic oligonucleotide
  misc_feature 1..20: note = Target: ANGPTL3; (-) strand; PAM type: YTN; PAM sequence: CTA
  source 1..20: mol_type = other DNA
ttcacaataacaaagacttg

SEQ ID NO: 13753 - DNA, 20 bp, synthetic construct
  misc_feature 1..20: note = Description of Artificial Sequence: Synthetic oligonucleotide
  misc_feature 1..20: note = Target: ANGPTL3; (-) strand; PAM type: YTN; PAM sequence: TTG
  source 1..20: mol_type = other DNA
cagcactattcacaataaca

SEQ ID NO: 13754 - DNA, 20 bp, synthetic construct
  misc_feature 1..20: note = Description of Artificial Sequence: Synthetic oligonucleotide
  misc_feature 1..20: note = Target: ANGPTL3; (-) strand; PAM type: YTN; PAM sequence: TTA
  source 1..20: mol_type = other DNA
ttgcagcactattcacaata

SEQ ID NO: 13755 - DNA, 20 bp, synthetic construct
  misc_feature 1..20: note = Description of Artificial Sequence: Synthetic oligonucleotide
  misc_feature 1..20: note = Target: ANGPTL3; (-) strand; PAM type: YTN; PAM sequence: TTT
  source 1..20: mol_type = other DNA
attgcagcactattcacaat

SEQ ID NO: 13756 - DNA, 20 bp, synthetic construct
  misc_feature 1..20: note = Description of Artificial Sequence: Synthetic oligonucleotide
  misc_feature 1..20: note = Target: ANGPTL3; (-) strand; PAM type: YTN; PAM sequence: CTA
  source 1..20: mol_type = other DNA
taaagacacatgcacacatg

SEQ ID NO: 13757 - DNA, 20 bp, synthetic construct
  misc_feature 1..20: note = Description of Artificial Sequence: Synthetic oligonucleotide
  misc_feature 1..20: note = Target: ANGPTL3; (-) strand; PAM type: YTN; PAM sequence: CTA
  source 1..20: mol_type = other DNA
ctataaagacacatgcacac

SEQ ID NO: 13758 - DNA, 20 bp, synthetic construct
  misc_feature 1..20: note = Description of Artificial Sequence: Synthetic oligonucleotide
  misc_feature 1..20: note = Target: ANGPTL3; (-) strand; PAM type: YTN; PAM sequence: TTC
  source 1..20: mol_type = other DNA
tactataaagacacatgcac

SEQ ID NO: 13759 - DNA, 20 bp, synthetic construct
  misc_feature 1..20: note = Description of Artificial Sequence: Synthetic oligonucleotide
  misc_feature 1..20: note = Target: ANGPTL3; (-) strand; PAM type: YTN; PAM sequence: TTA
  source 1..20: mol_type = other DNA
taaatcattctactataaag

SEQ ID NO: 13760 - DNA, 20 bp, synthetic construct
  misc_feature 1..20: note = Description of Artificial Sequence: Synthetic oligonucleotide
  misc_feature 1..20: note = Target: ANGPTL3; (-) strand; PAM type: YTN; PAM sequence: TTC
  source 1..20: mol_type = other DNA
aaaggattataaatcattct

SEQ ID NO: 13761 - DNA, 20 bp, synthetic construct
  misc_feature 1..20: note = Description of Artificial Sequence: Synthetic oligonucleotide
  misc_feature 1..20: note = Target: ANGPTL3; (-) strand; PAM type: YTN; PAM sequence: TTG
  source 1..20: mol_type = other DNA
ggtatatattcaaaggatta

SEQ ID NO: 13762 - DNA, 20 bp, synthetic construct
  misc_feature 1..20: note = Description of Artificial Sequence: Synthetic oligonucleotide
  misc_feature 1..20: note = Target: ANGPTL3; (-) strand; PAM type: YTN; PAM sequence: TTA
  source 1..20: mol_type = other DNA
ttgggtatatattcaaagga

SEQ ID NO: 13763 - DNA, 20 bp, synthetic construct
  misc_feature 1..20: note = Description of Artificial Sequence: Synthetic oligonucleotide
  misc_feature 1..20: note = Target: ANGPTL3; (-) strand; PAM type: YTN; PAM sequence: TTG
  source 1..20: mol_type = other DNA
acccagtaatcccattattg

SEQ ID NO: 13764 - DNA, 20 bp, synthetic construct
  misc_feature 1..20: note = Description of Artificial Sequence: Synthetic oligonucleotide
  misc_feature 1..20: note = Target: ANGPTL3; (-) strand; PAM type: YTN; PAM sequence: TTT
  source 1..20: mol_type = other DNA
gacccagtaatcccattatt

SEQ ID NO: 13765 - DNA, 20 bp, synthetic construct
  misc_feature 1..20: note = Description of Artificial Sequence: Synthetic oligonucleotide
  misc_feature 1..20: note = Target: ANGPTL3; (-) strand; PAM type: YTN; PAM sequence: CTA
  source 1..20: mol_type = other DNA
gaaataccatttgacccagt

SEQ ID NO: 13766 - DNA, 20 bp, synthetic construct
  misc_feature 1..20: note = Description of Artificial Sequence: Synthetic oligonucleotide
  misc_feature 1..20: note = Target: ANGPTL3; (-) strand; PAM type: YTN; PAM sequence: CTA
  source 1..20: mol_type = other DNA
gaactagaaataccatttga

SEQ ID NO: 13767 - DNA, 20 bp, synthetic construct
  misc_feature 1..20: note = Description of Artificial Sequence: Synthetic oligonucleotide
  misc_feature 1..20: note = Target: ANGPTL3; (-) strand; PAM type: YTN; PAM sequence: CTC
  source 1..20: mol_type = other DNA
aaggaactagaactagaaat

SEQ ID NO: 13768 - DNA, 20 bp, synthetic construct
  misc_feature 1..20: note = Description of Artificial Sequence: Synthetic oligonucleotide
  misc_feature 1..20: note = Target: ANGPTL3; (-) strand; PAM type: YTN; PAM sequence: TTC
  source 1..20: mol_type = other DNA
ctcaaggaactagaactaga

SEQ ID NO: 13769 - DNA, 20 bp, synthetic construct
  misc_feature 1..20: note = Description of Artificial Sequence: Synthetic oligonucleotide
  misc_feature 1..20: note = Target: ANGPTL3; (-) strand; PAM type: YTN; PAM sequence: TTG
  source 1..20: mol_type = other DNA
tggaagacagtgtggcgatt

SEQ ID NO: 13770 - DNA, 20 bp, synthetic construct
  misc_feature 1..20: note = Description of Artificial Sequence: Synthetic oligonucleotide
  misc_feature 1..20: note = Target: ANGPTL3; (-) strand; PAM type: YTN; PAM sequence: TTC
  source 1..20: mol_type = other DNA
aaccattgtggaagacagtg

SEQ ID NO: 13771 - DNA, 20 bp, synthetic construct
  misc_feature 1..20: note = Description of Artificial Sequence: Synthetic oligonucleotide
  misc_feature 1..20: note = Target: ANGPTL3; (-) strand; PAM type: YTN; PAM sequence: TTA
  source 1..20: mol_type = other DNA
gttcaaccattgtggaagac

SEQ ID NO: 13772 - DNA, 20 bp, synthetic construct
  misc_feature 1..20: note = Description of Artificial Sequence: Synthetic oligonucleotide
  misc_feature 1..20: note = Target: ANGPTL3; (-) strand; PAM type: YTN; PAM sequence: TTC
  source 1..20: mol_type = other DNA
aaattagttcaaccattgtg

SEQ ID NO: 13773 - DNA, 20 bp, synthetic construct
  misc_feature 1..20: note = Description of Artificial Sequence: Synthetic oligonucleotide
  misc_feature 1..20: note = Target: ANGPTL3; (-) strand; PAM type: YTN; PAM sequence: TTT
  source 1..20: mol_type = other DNA
caaattagttcaaccattgt

SEQ ID NO: 13774 - DNA, 20 bp, synthetic construct
  misc_feature 1..20: note = Description of Artificial Sequence: Synthetic oligonucleotide
  misc_feature 1..20: note = Target: ANGPTL3; (-) strand; PAM type: YTN; PAM sequence: TTG
  source 1..20: mol_type = other DNA
tgatataaaaatatgtatgt

SEQ ID NO: 13775 - DNA, 20 bp, synthetic construct
  misc_feature 1..20: note = Description of Artificial Sequence: Synthetic oligonucleotide
  misc_feature 1..20: note = Target: ANGPTL3; (-) strand; PAM type: YTN; PAM sequence: CTA
  source 1..20: mol_type = other DNA
taatagttgtgatataaaaa

SEQ ID NO: 13776 - DNA, 20 bp, synthetic construct
  misc_feature 1..20: note = Description of Artificial Sequence: Synthetic oligonucleotide
  misc_feature 1..20: note = Target: ANGPTL3; (-) strand; PAM type: YTN; PAM sequence: TTG
  source 1..20: mol_type = other DNA
agatgtctataatagttgtg

SEQ ID NO: 13777 - DNA, 20 bp, synthetic construct
  misc_feature 1..20: note = Description of Artificial Sequence: Synthetic oligonucleotide
  misc_feature 1..20: note = Target: ANGPTL3; (-) strand; PAM type: YTN; PAM sequence: TTT
  source 1..20: mol_type = other DNA
gagatgtctataatagttgt

SEQ ID NO: 13778 - DNA, 20 bp, synthetic construct
  misc_feature 1..20: note = Description of Artificial Sequence: Synthetic oligonucleotide
  misc_feature 1..20: note = Target: ANGPTL3; (-) strand; PAM type: YTN; PAM sequence: TTT
  source 1..20: mol_type = other DNA
tgagatgtctataatagttg

SEQ ID NO: 13779 - DNA, 20 bp, synthetic construct
  misc_feature 1..20: note = Description of Artificial Sequence: Synthetic oligonucleotide
  misc_feature 1..20: note = Target: ANGPTL3; (-) strand; PAM type: YTN; PAM sequence: CTA
  source 1..20: mol_type = other DNA
aatagtaataagcatcaaca

SEQ ID NO: 13780 - DNA, 20 bp, synthetic construct
  misc_feature 1..20: note = Description of Artificial Sequence: Synthetic oligonucleotide
  misc_feature 1..20: note = Target: ANGPTL3; (-) strand; PAM type: YTN; PAM sequence: TTC
  source 1..20: mol_type = other DNA
taaatagtaataagcatcaa

SEQ ID NO: 13781 - DNA, 20 bp, synthetic construct
  misc_feature 1..20: note = Description of Artificial Sequence: Synthetic oligonucleotide
  misc_feature 1..20: note = Target: ANGPTL3; (-) strand; PAM type: YTN; PAM sequence: TTT
  source 1..20: mol_type = other DNA
ctaaatagtaataagcatca

SEQ ID NO: 13782 - DNA, 20 bp, synthetic construct
  misc_feature 1..20: note = Description of Artificial Sequence: Synthetic oligonucleotide
  misc_feature 1..20: note = Target: ANGPTL3; (-) strand; PAM type: YTN; PAM sequence: TTT
  source 1..20: mol_type = other DNA
tctaaatagtaataagcatc

SEQ ID NO: 13783 - DNA, 20 bp, synthetic construct
  misc_feature 1..20: note = Description of Artificial Sequence: Synthetic oligonucleotide
  misc_feature 1..20: note = Target: ANGPTL3; (-) strand; PAM type: YTN; PAM sequence: TTG
  source 1..20: mol_type = other DNA
tattttctaaatagtaataa

SEQ ID NO: 13784 - DNA, 20 bp, synthetic construct
  misc_feature 1..20: note = Description of Artificial Sequence: Synthetic oligonucleotide
  misc_feature 1..20: note = Target: ANGPTL3; (-) strand; PAM type: YTN; PAM sequence: CTA
  source 1..20: mol_type = other DNA
ttgtattttctaaatagtaa

SEQ ID NO: 13785 - DNA, 20 bp, synthetic construct
  misc_feature 1..20: note = Description of Artificial Sequence: Synthetic oligonucleotide
  misc_feature 1..20: note = Target: ANGPTL3; (-) strand; PAM type: YTN; PAM sequence: TTA
  source 1..20: mol_type = other DNA
aaaaactattgtattttcta

SEQ ID NO: 13786 - DNA, 20 bp, synthetic construct
  misc_feature 1..20: note = Description of Artificial Sequence: Synthetic oligonucleotide
  misc_feature 1..20: note = Target: ANGPTL3; (+) strand; PAM type: YTN; PAM sequence: CTG
  source 1..20: mol_type = other DNA
aaaaaatctattgtttgtta

SEQ ID NO: 13787 - DNA, 20 bp, synthetic construct
  misc_feature 1..20: note = Description of Artificial Sequence: Synthetic oligonucleotide
  misc_feature 1..20: note = Target: ANGPTL3; (+) strand; PAM type: YTN; PAM sequence: CTA
  source 1..20: mol_type = other DNA
ttgtttgttatatatataac

SEQ ID NO: 13788 - DNA, 20 bp, synthetic construct
  misc_feature 1..20: note = Description of Artificial Sequence: Synthetic oligonucleotide
  misc_feature 1..20: note = Target: ANGPTL3; (+) strand; PAM type: YTN; PAM sequence: TTG
  source 1..20: mol_type = other DNA
tttgttatatatataacaaa

SEQ ID NO: 13789 - DNA, 20 bp, synthetic construct
  misc_feature 1..20: note = Description of Artificial Sequence: Synthetic oligonucleotide
  misc_feature 1..20: note = Target: ANGPTL3; (+) strand; PAM type: YTN; PAM sequence: TTT
  source 1..20: mol_type = other DNA
gttatatatataacaaagaa

SEQ ID NO: 13790 - DNA, 20 bp, synthetic construct
  misc_feature 1..20: note = Description of Artificial Sequence: Synthetic oligonucleotide
  misc_feature 1..20: note = Target: ANGPTL3; (+) strand; PAM type: YTN; PAM sequence: TTG
  source 1..20: mol_type = other DNA
ttatatatataacaaagaat

SEQ ID NO: 13791 - DNA, 20 bp, synthetic construct
  misc_feature 1..20: note = Description of Artificial Sequence: Synthetic oligonucleotide
  misc_feature 1..20: note = Target: ANGPTL3; (+) strand; PAM type: YTN; PAM sequence: TTA
  source 1..20: mol_type = other DNA
tatatataacaaagaattag

SEQ ID NO: 13792 - DNA, 20 bp, synthetic construct
  misc_feature 1..20: note = Description of Artificial Sequence: Synthetic oligonucleotide
  misc_feature 1..20: note = Target: ANGPTL3; (+) strand; PAM type: YTN; PAM sequence: TTA
  source 1..20: mol_type = other DNA
gtatccacaatatgtaaata

SEQ ID NO: 13793 - DNA, 20 bp, synthetic construct
  misc_feature 1..20: note = Description of Artificial Sequence: Synthetic oligonucleotide
  misc_feature 1..20: note = Target: ANGPTL3; (+) strand; PAM type: YTN; PAM sequence: TTC
  source 1..20: mol_type = other DNA
ctaaaattagtcagaaagag

SEQ ID NO: 13794 - DNA, 20 bp, synthetic construct
  misc_feature 1..20: note = Description of Artificial Sequence: Synthetic oligonucleotide
  misc_feature 1..20: note = Target: ANGPTL3; (+) strand; PAM type: YTN; PAM sequence: CTA
  source 1..20: mol_type = other DNA
aaattagtcagaaagagaca

SEQ ID NO: 13795 - DNA, 20 bp, synthetic construct
  misc_feature 1..20: note = Description of Artificial Sequence: Synthetic oligonucleotide
  misc_feature 1..20: note = Target: ANGPTL3; (+) strand; PAM type: YTN; PAM sequence: TTA
  source 1..20: mol_type = other DNA
gtcagaaagagacaaactta

SEQ ID NO: 13796 - DNA, 20 bp, synthetic construct
  misc_feature 1..20: note = Description of Artificial Sequence: Synthetic oligonucleotide
  misc_feature 1..20: note = Target: ANGPTL3; (+) strand; PAM type: YTN; PAM sequence: CTT
  source 1..20: mol_type = other DNA
aaaaagagggtaacaaggag

SEQ ID NO: 13797 - DNA, 20 bp, synthetic construct
  misc_feature 1..20: note = Description of Artificial Sequence: Synthetic oligonucleotide
  misc_feature 1..20: note = Target: ANGPTL3; (+) strand; PAM type: YTN; PAM sequence: TTA
  source 1..20: mol_type = other DNA
aaaagagggtaacaaggagg

SEQ ID NO: 13798 - DNA, 20 bp, synthetic construct
  misc_feature 1..20: note = Description of Artificial Sequence: Synthetic oligonucleotide
  misc_feature 1..20: note = Target: ANGPTL3; (+) strand; PAM type: YTN; PAM sequence: TTA
  source 1..20: mol_type = other DNA
tgtacataaccagatgattc

SEQ ID NO: 13799 - DNA, 20 bp, synthetic construct
  misc_feature 1..20: note = Description of Artificial Sequence: Synthetic oligonucleotide
  misc_feature 1..20: note = Target: ANGPTL3; (+) strand; PAM type: YTN; PAM sequence: TTC
  source 1..20: mol_type = other DNA
gcaaagacggcaacagagat

SEQ ID NO: 13800 - DNA, 20 bp, synthetic construct
  misc_feature 1..20: note = Description of Artificial Sequence: Synthetic oligonucleotide
  misc_feature 1..20: note = Target: ANGPTL3; (+) strand; PAM type: YTN; PAM sequence: CTA
  source 1..20: mol_type = other DNA
gatatatacttgtctattag

SEQ ID NO: 13801 - DNA, 20 bp, synthetic construct
  misc_feature 1..20: note = Description of Artificial Sequence: Synthetic oligonucleotide
  misc_feature 1..20: note = Target: ANGPTL3; (+) strand; PAM type: YTN; PAM sequence: CTT
  source 1..20: mol_type = other DNA
gtctattagatttatcaaca

SEQ ID NO: 13802 - DNA, 20 bp, synthetic construct
  misc_feature 1..20: note = Description of Artificial Sequence: Synthetic oligonucleotide
  misc_feature 1..20: note = Target: ANGPTL3; (+) strand; PAM type: YTN; PAM sequence: TTG
  source 1..20: mol_type = other DNA
tctattagatttatcaacat

SEQ ID NO: 13803 - DNA, 20 bp, synthetic construct
  misc_feature 1..20: note = Description of Artificial Sequence: Synthetic oligonucleotide
  misc_feature 1..20: note = Target: ANGPTL3; (+) strand; PAM type: YTN; PAM sequence: CTA
  source 1..20: mol_type = other DNA
ttagatttatcaacattttt

SEQ ID NO: 13804 - DNA, 20 bp, synthetic construct
  misc_feature 1..20: note = Description of Artificial Sequence: Synthetic oligonucleotide
  misc_feature 1..20: note = Target: ANGPTL3; (+) strand; PAM type: YTN; PAM sequence: TTA
  source 1..20: mol_type = other DNA
gatttatcaacattttttgc

SEQ ID NO: 13805 - DNA, 20 bp, synthetic construct
  misc_feature 1..20: note = Description of Artificial Sequence: Synthetic oligonucleotide
  misc_feature 1..20: note = Target: ANGPTL3; (+) strand; PAM type: YTN; PAM sequence: TTT
  source 1..20: mol_type = other DNA
atcaacattttttgcctttt

SEQ ID NO: 13806 - DNA, 20 bp, synthetic construct
  misc_feature 1..20: note = Description of Artificial Sequence: Synthetic oligonucleotide
  misc_feature 1..20: note = Target: ANGPTL3; (+) strand; PAM type: YTN; PAM sequence: TTA
  source 1..20: mol_type = other DNA
tcaacattttttgccttttt

SEQ ID NO: 13807 - DNA, 20 bp, synthetic construct
  misc_feature 1..20: note = Description of Artificial Sequence: Synthetic oligonucleotide
  misc_feature 1..20: note = Target: ANGPTL3; (+) strand; PAM type: YTN; PAM sequence: TTT
  source 1..20: mol_type = other DNA
tttgcctttttcattaaaag

SEQ ID NO: 13808 - DNA, 20 bp, synthetic construct
  misc_feature 1..20: note = Description of Artificial Sequence: Synthetic oligonucleotide
  misc_feature 1..20: note = Target: ANGPTL3; (+) strand; PAM type: YTN; PAM sequence: TTT
  source 1..20: mol_type = other DNA
ttgcctttttcattaaaagc

SEQ ID NO: 13809 - DNA, 20 bp, synthetic construct
  misc_feature 1..20: note = Description of Artificial Sequence: Synthetic oligonucleotide
  misc_feature 1..20: note = Target: ANGPTL3; (+) strand; PAM type: YTN; PAM sequence: TTT
  source 1..20: mol_type = other DNA
tgcctttttcattaaaagca

SEQ ID NO: 13810 - DNA, 20 bp, synthetic construct
  misc_feature 1..20: note = Description of Artificial Sequence: Synthetic oligonucleotide
  misc_feature 1..20: note = Target: ANGPTL3; (+) strand; PAM type: YTN; PAM sequence: TTT
  source 1..20: mol_type = other DNA
gcctttttcattaaaagcat

SEQ ID NO: 13811 - DNA, 20 bp, synthetic construct
  misc_feature 1..20: note = Description of Artificial Sequence: Synthetic oligonucleotide
  misc_feature 1..20: note = Target: ANGPTL3; (+) strand; PAM type: YTN; PAM sequence: TTG
  source 1..20: mol_type = other DNA
cctttttcattaaaagcatt

SEQ ID NO: 13812 - DNA, 20 bp, synthetic construct
  misc_feature 1..20: note = Description of Artificial Sequence: Synthetic oligonucleotide
  misc_feature 1..20: note = Target: ANGPTL3; (+) strand; PAM type: YTN; PAM sequence: CTT
  source 1..20: mol_type = other DNA
tttcattaaaagcatttgta

SEQ ID NO: 13813 - DNA, 20 bp, synthetic construct
  misc_feature 1..20: note = Description of Artificial Sequence: Synthetic oligonucleotide
  misc_feature 1..20: note = Target: ANGPTL3; (+) strand; PAM type: YTN; PAM sequence: TTT
  source 1..20: mol_type = other DNA
ttcattaaaagcatttgtaa

SEQ ID NO: 13814 - DNA, 20 bp, synthetic construct
  misc_feature 1..20: note = Description of Artificial Sequence: Synthetic oligonucleotide
  misc_feature 1..20: note = Target: ANGPTL3; (+) strand; PAM type: YTN; PAM sequence: TTT
  source 1..20: mol_type = other DNA
tcattaaaagcatttgtaaa

SEQ ID NO: 13815 - DNA, 20 bp, synthetic construct
  misc_feature 1..20: note = Description of Artificial Sequence: Synthetic oligonucleotide
  misc_feature 1..20: note = Target: ANGPTL3; (+) strand; PAM type: YTN; PAM sequence: TTT
  source 1..20: mol_type = other DNA
cattaaaagcatttgtaaaa

SEQ ID NO: 13816 - DNA, 20 bp, synthetic construct
  misc_feature 1..20: note = Description of Artificial Sequence: Synthetic oligonucleotide
  misc_feature 1..20: note = Target: ANGPTL3; (+) strand; PAM type: YTN; PAM sequence: TTC
  source 1..20: mol_type = other DNA
attaaaagcatttgtaaaag

SEQ ID NO: 13817 - DNA, 20 bp, synthetic construct
  misc_feature 1..20: note = Description of Artificial Sequence: Synthetic oligonucleotide
  misc_feature 1..20: note = Target: ANGPTL3; (+) strand; PAM type: YTN; PAM sequence: TTA
  source 1..20: mol_type = other DNA
aaagcatttgtaaaaggata

SEQ ID NO: 13818 - DNA, 20 bp, synthetic construct
  misc_feature 1..20: note = Description of Artificial Sequence: Synthetic oligonucleotide
  misc_feature 1..20: note = Target: ANGPTL3; (+) strand; PAM type: YTN; PAM sequence: TTT
  source 1..20: mol_type = other DNA
gtaaaaggatataggaaaag

SEQ ID NO: 13819 - DNA, 20 bp, synthetic construct
  misc_feature 1..20: note = Description of Artificial Sequence: Synthetic oligonucleotide
  misc_feature 1..20: note = Target: ANGPTL3; (+) strand; PAM type: YTN; PAM sequence: TTG
  source 1..20: mol_type = other DNA
taaaaggatataggaaaaga

SEQ ID NO: 13820 - DNA, 20 bp, synthetic construct
  misc_feature 1..20: note = Description of Artificial Sequence: Synthetic oligonucleotide
  misc_feature 1..20: note = Target: ANGPTL3; (+) strand; PAM type: YTN; PAM sequence: CTC
  source 1..20: mol_type = other DNA
tcatatactcctggcaggga

SEQ ID NO: 13821 - DNA, 20 bp, synthetic construct
  misc_feature 1..20: note = Description of Artificial Sequence: Synthetic oligonucleotide
  misc_feature 1..20: note = Target: ANGPTL3; (+) strand; PAM type: YTN; PAM sequence: CTC
  source 1..20: mol_type = other DNA
atatactcctggcagggatg

SEQ ID NO: 13822 - DNA, 20 bp, synthetic construct
  misc_feature 1..20: note = Description of Artificial Sequence: Synthetic oligonucleotide
  misc_feature 1..20: note = Target: ANGPTL3; (+) strand; PAM type: YTN; PAM sequence: CTC
  source 1..20: mol_type = other DNA
ctggcagggatgtaaattgg

SEQ ID NO: 13823 - DNA, 20 bp, synthetic construct
  misc_feature 1..20: note = Description of Artificial Sequence: Synthetic oligonucleotide
  misc_feature 1..20: note = Target: ANGPTL3; (+) strand; PAM type: YTN; PAM sequence: CTG
  source 1..20: mol_type = other DNA
gcagggatgtaaattggtac

SEQ ID NO: 13824 - DNA, 20 bp, synthetic construct
  misc_feature 1..20: note = Description of Artificial Sequence: Synthetic oligonucleotide
  misc_feature 1..20: note = Target: ANGPTL3; (+) strand; PAM type: YTN; PAM sequence: TTG
  source 1..20: mol_type = other DNA
gtacaacccttttgaaggac

SEQ ID NO: 13825 - DNA, 20 bp, synthetic construct
  misc_feature 1..20: note = Description of Artificial Sequence: Synthetic oligonucleotide
  misc_feature 1..20: note = Target: ANGPTL3; (+) strand; PAM type: YTN; PAM sequence: CTT
  source 1..20: mol_type = other DNA
ttgaaggacaatctgacaaa

SEQ ID NO: 13826 - DNA, 20 bp, synthetic construct
  misc_feature 1..20: note = Description of Artificial Sequence: Synthetic oligonucleotide
  misc_feature 1..20: note = Target: ANGPTL3; (+) strand; PAM type: YTN; PAM sequence: TTT
  source 1..20: mol_type = other DNA
tgaaggacaatctgacaaaa

SEQ ID NO: 13827 - DNA, 20 bp, synthetic construct
  misc_feature 1..20: note = Description of Artificial Sequence: Synthetic oligonucleotide
  misc_feature 1..20: note = Target: ANGPTL3; (+) strand; PAM type: YTN; PAM sequence: TTT
  source 1..20: mol_type = other DNA
gaaggacaatctgacaaaag

SEQ ID NO: 13828 - DNA, 20 bp, synthetic construct
  misc_feature 1..20: note = Description of Artificial Sequence: Synthetic oligonucleotide
  misc_feature 1..20: note = Target: ANGPTL3; (+) strand; PAM type: YTN; PAM sequence: TTG
  source 1..20: mol_type = other DNA
aaggacaatctgacaaaagc

SEQ ID NO: 13829 - DNA, 20 bp, synthetic construct
  misc_feature 1..20: note = Description of Artificial Sequence: Synthetic oligonucleotide
  misc_feature 1..20: note = Target: ANGPTL3; (+) strand; PAM type: YTN; PAM sequence: CTG
  source 1..20: mol_type = other DNA
acaaaagcaatcgtaagtta

SEQ ID NO: 13830 - DNA, 20 bp, synthetic construct
  misc_feature 1..20: note = Description of Artificial Sequence: Synthetic oligonucleotide
  misc_feature 1..20: note = Target: ANGPTL3; (+) strand; PAM type: YTN; PAM sequence: TTA
  source 1..20: mol_type = other DNA
caagtcaacatctatgaatg

SEQ ID NO: 13831 - DNA, 20 bp, synthetic construct
  misc_feature 1..20: note = Description of Artificial Sequence: Synthetic oligonucleotide
  misc_feature 1..20: note = Target: ANGPTL3; (+) strand; PAM type: YTN; PAM sequence: CTA
  source 1..20: mol_type = other DNA
tgaatgtatatgaaaatatt

SEQ ID NO: 13832 - DNA, 20 bp, synthetic construct
  misc_feature 1..20: note = Description of Artificial Sequence: Synthetic oligonucleotide
  misc_feature 1..20: note = Target: ANGPTL3; (+) strand; PAM type: YTN; PAM sequence: TTT
  source 1..20: mol_type = other DNA
atatacatacatcaccacca

SEQ ID NO: 13833 - DNA, 20 bp, synthetic construct
  misc_feature 1..20: note = Description of Artificial Sequence: Synthetic oligonucleotide
  misc_feature 1..20: note = Target: ANGPTL3; (+) strand; PAM type: YTN; PAM sequence: TTA
  source 1..20: mol_type = other DNA
tatacatacatcaccaccat

SEQ ID NO: 13834 - DNA, 20 bp, synthetic construct
  misc_feature 1..20: note = Description of Artificial Sequence: Synthetic oligonucleotide
  misc_feature 1..20: note = Target: ANGPTL3; (+) strand; PAM type: YTN; PAM sequence: TTT
  source 1..20: mol_type = other DNA
tctatacatactgtttataa

SEQ ID NO: 13835 - DNA, 20 bp, synthetic construct
  misc_feature 1..20: note = Description of Artificial Sequence: Synthetic oligonucleotide
  misc_feature 1..20: note = Target: ANGPTL3; (+) strand; PAM type: YTN; PAM sequence: TTT
  source 1..20: mol_type = other DNA
ctatacatactgtttataat

SEQ ID NO: 13836 - DNA, 20 bp, synthetic construct
  misc_feature 1..20: note = Description of Artificial Sequence: Synthetic oligonucleotide
  misc_feature 1..20: note = Target: ANGPTL3; (+) strand; PAM type: YTN; PAM sequence: TTC
  source 1..20: mol_type = other DNA
tatacatactgtttataatt

SEQ ID NO: 13837 - DNA, 20 bp, synthetic construct
  misc_feature 1..20: note = Description of Artificial Sequence: Synthetic oligonucleotide
  misc_feature 1..20: note = Target: ANGPTL3; (+) strand; PAM type: YTN; PAM sequence: CTA
  source 1..20: mol_type = other DNA
tacatactgtttataattag

SEQ ID NO: 13838 - DNA, 20 bp, synthetic construct
  misc_feature 1..20: note = Description of Artificial Sequence: Synthetic oligonucleotide
  misc_feature 1..20: note = Target: ANGPTL3; (+) strand; PAM type: YTN; PAM sequence: CTG
  source 1..20: mol_type = other DNA
tttataattagaaaattgga

SEQ ID NO: 13839 - DNA, 20 bp, synthetic construct
  misc_feature 1..20: note = Description of Artificial Sequence: Synthetic oligonucleotide
  misc_feature 1..20: note = Target: ANGPTL3; (+) strand; PAM type: YTN; PAM sequence: TTT
  source 1..20: mol_type = other DNA
ataattagaaaattggaaac

SEQ ID NO: 13840 - DNA, 20 bp, synthetic construct
  misc_feature 1..20: note = Description of Artificial Sequence: Synthetic oligonucleotide
  misc_feature 1..20: note = Target: ANGPTL3; (+) strand; PAM type: YTN; PAM sequence: TTA
  source 1..20: mol_type = other DNA
taattagaaaattggaaaca

SEQ ID NO: 13841 - DNA, 20 bp, synthetic construct
  misc_feature 1..20: note = Description of Artificial Sequence: Synthetic oligonucleotide
  misc_feature 1..20: note = Target: ANGPTL3; (+) strand; PAM type: YTN; PAM sequence: TTA
  source 1..20: mol_type = other DNA
gaaaattggaaacaaatgat

SEQ ID NO: 13842 - DNA, 20 bp, synthetic construct
  misc_feature 1..20: note = Description of Artificial Sequence: Synthetic oligonucleotide
  misc_feature 1..20: note = Target: ANGPTL3; (+) strand; PAM type: YTN; PAM sequence: TTG
  source 1..20: mol_type = other DNA
gaaacaaatgattaaaaggg

SEQ ID NO: 13843 - DNA, 20 bp, synthetic construct
  misc_feature 1..20: note = Description of Artificial Sequence: Synthetic oligonucleotide
  misc_feature 1..20: note = Target: ANGPTL3; (+) strand; PAM type: YTN; PAM sequence: TTA
  source 1..20: mol_type = other DNA
aaagggggctgattaaatta

SEQ ID NO: 13844 - DNA, 20 bp, synthetic construct
  misc_feature 1..20: note = Description of Artificial Sequence: Synthetic oligonucleotide
  misc_feature 1..20: note = Target: ANGPTL3; (+) strand; PAM type: YTN; PAM sequence: CTG
  source 1..20: mol_type = other DNA
attaaattaaggttcatcta

SEQ ID NO: 13845 - DNA, 20 bp, synthetic construct
  misc_feature 1..20: note = Description of Artificial Sequence: Synthetic oligonucleotide
  misc_feature 1..20: note = Target: ANGPTL3; (+) strand; PAM type: YTN; PAM sequence: TTA
  source 1..20: mol_type = other DNA
aattaaggttcatctatata

SEQ ID NO: 13846 - DNA, 20 bp, synthetic construct
  misc_feature 1..20: note = Description of Artificial Sequence: Synthetic oligonucleotide
  misc_feature 1..20: note = Target: ANGPTL3; (+) strand; PAM type: YTN; PAM sequence: TTA
  source 1..20: mol_type = other DNA
aggttcatctatataacagg

SEQ ID NO: 13847 - DNA, 20 bp, synthetic construct
  misc_feature 1..20: note = Description of Artificial Sequence: Synthetic oligonucleotide
  misc_feature 1..20: note = Target: ANGPTL3; (+) strand; PAM type: YTN; PAM sequence: TTC
  source 1..20: mol_type = other DNA
atctatataacaggattatg

SEQ ID NO: 13848 - DNA, 20 bp, synthetic construct
  misc_feature 1..20: note = Description of Artificial Sequence: Synthetic oligonucleotide
  misc_feature 1..20: note = Target: ANGPTL3; (+) strand; PAM type: YTN; PAM sequence: CTA
  source 1..20: mol_type = other DNA
tataacaggattatgcagct

SEQ ID NO: 13849 - DNA, 20 bp, synthetic construct
  misc_feature 1..20: note = Description of Artificial Sequence: Synthetic oligonucleotide
  misc_feature 1..20: note = Target: ANGPTL3; (+) strand; PAM type: YTN; PAM sequence: TTA
  source 1..20: mol_type = other DNA
tgcagctattaaaaaggacg

SEQ ID NO: 13850 - DNA, 20 bp, synthetic construct
  misc_feature 1..20: note = Description of Artificial Sequence: Synthetic oligonucleotide
  misc_feature 1..20: note = Target: ANGPTL3; (+) strand; PAM type: YTN; PAM sequence: CTA
  source 1..20: mol_type = other DNA
ttaaaaaggacgtggtaact

SEQ ID NO: 13851 - DNA, 20 bp, synthetic construct
  misc_feature 1..20: note = Description of Artificial Sequence: Synthetic oligonucleotide
  misc_feature 1..20: note = Target: ANGPTL3; (+) strand; PAM type: YTN; PAM sequence: TTA
  source 1..20: mol_type = other DNA
aaaaggacgtggtaactcta

SEQ ID NO: 13852 - DNA, 20 bp, synthetic construct
  misc_feature 1..20: note = Description of Artificial Sequence: Synthetic oligonucleotide
  misc_feature 1..20: note = Target: ANGPTL3; (+) strand; PAM type: YTN; PAM sequence: CTC
  source 1..20: mol_type = other DNA
tatagacattcataggaaaa

SEQ ID NO: 13853 - DNA, 20 bp, synthetic construct
  misc_feature 1..20: note = Description of Artificial Sequence: Synthetic oligonucleotide
  misc_feature 1..20: note = Target: ANGPTL3; (+) strand; PAM type: YTN; PAM sequence: CTA
  source 1..20: mol_type = other DNA
tagacattcataggaaaata

SEQ ID NO: 13854 - DNA, 20 bp, synthetic construct
  misc_feature 1..20: note = Description of Artificial Sequence: Synthetic oligonucleotide
  misc_feature 1..20: note = Target: ANGPTL3; (+) strand; PAM type: YTN; PAM sequence: TTC
  source 1..20: mol_type = other DNA
ataggaaaataaattttaaa

SEQ ID NO: 13855 - DNA, 20 bp, synthetic construct
  misc_feature 1..20: note = Description of Artificial Sequence: Synthetic oligonucleotide
  misc_feature 1..20: note = Target: ANGPTL3; (+) strand; PAM type: YTN; PAM sequence: TTT
  source 1..20: mol_type = other DNA
taaaatactaagatcctgaa

SEQ ID NO: 13856 - DNA, 20 bp, synthetic construct
  misc_feature 1..20: note = Description of Artificial Sequence: Synthetic oligonucleotide
  misc_feature 1..20: note = Target: ANGPTL3; (+) strand; PAM type: YTN; PAM sequence: TTT
  source 1..20: mol_type = other DNA
aaaatactaagatcctgaat

SEQ ID NO: 13857 - DNA, 20 bp, synthetic construct
  misc_feature 1..20: note = Description of Artificial Sequence: Synthetic oligonucleotide
  misc_feature 1..20: note = Target: ANGPTL3; (+) strand; PAM type: YTN; PAM sequence: TTA
  source 1..20: mol_type = other DNA
aaatactaagatcctgaatg

SEQ ID NO: 13858 - DNA, 20 bp, synthetic construct
  misc_feature 1..20: note = Description of Artificial Sequence: Synthetic oligonucleotide
  misc_feature 1..20: note = Target: ANGPTL3; (+) strand; PAM type: YTN; PAM sequence: CTA
  source 1..20: mol_type = other DNA
agatcctgaatgatatatat

SEQ ID NO: 13859 - DNA, 20 bp, synthetic construct
  misc_feature 1..20: note = Description of Artificial Sequence: Synthetic oligonucleotide
  misc_feature 1..20: note = Target: ANGPTL3; (+) strand; PAM type: YTN; PAM sequence: CTG
  source 1..20: mol_type = other DNA
aatgatatatatatcatgag

SEQ ID NO: 13860 - DNA, 20 bp, synthetic construct
  misc_feature 1..20: note = Description of Artificial Sequence: Synthetic oligonucleotide
  misc_feature 1..20: note = Target: ANGPTL3; (+) strand; PAM type: YTN; PAM sequence: CTA
  source 1..20: mol_type = other DNA
ttatacataacaagatccca

SEQ ID NO: 13861 - DNA, 20 bp, synthetic construct
  misc_feature 1..20: note = Description of Artificial Sequence: Synthetic oligonucleotide
  misc_feature 1..20: note = Target: ANGPTL3; (+) strand; PAM type: YTN; PAM sequence: TTA
  source 1..20: mol_type = other DNA
tacataacaagatcccactt

SEQ ID NO: 13862 - DNA, 20 bp, synthetic construct
  misc_feature 1..20: note = Description of Artificial Sequence: Synthetic oligonucleotide
  misc_feature 1..20: note = Target: ANGPTL3; (+) strand; PAM type: YTN; PAM sequence: CTT
  source 1..20: mol_type = other DNA
gtgttataaaaaattatgtt

SEQ ID NO: 13863 - DNA, 20 bp, synthetic construct
  misc_feature 1..20: note = Description of Artificial Sequence: Synthetic oligonucleotide
  misc_feature 1..20: note = Target: ANGPTL3; (+) strand; PAM type: YTN; PAM sequence: TTG
  source 1..20: mol_type = other DNA
tgttataaaaaattatgttt

SEQ ID NO: 13864 - DNA, 20 bp, synthetic construct
  misc_feature 1..20: note = Description of Artificial Sequence: Synthetic oligonucleotide
  misc_feature 1..20: note = Target: ANGPTL3; (+) strand; PAM type: YTN; PAM sequence: TTA
  source 1..20: mol_type = other DNA
taaaaaattatgtttagtca

SEQ ID NO: 13865 - DNA, 20 bp, synthetic construct
  misc_feature 1..20: note = Description of Artificial Sequence: Synthetic oligonucleotide
  misc_feature 1..20: note = Target: ANGPTL3; (+) strand; PAM type: YTN; PAM sequence: TTA
  source 1..20: mol_type = other DNA
tgtttagtcattcaaagggt

SEQ ID NO: 13866 - DNA, 20 bp, synthetic construct
  misc_feature 1..20: note = Description of Artificial Sequence: Synthetic oligonucleotide
  misc_feature 1..20: note = Target: ANGPTL3; (+) strand; PAM type: YTN; PAM sequence: TTT
  source 1..20: mol_type = other DNA
agtcattcaaagggtctggt

SEQ ID NO: 13867 - DNA, 20 bp, synthetic construct
  misc_feature 1..20: note = Description of Artificial Sequence: Synthetic oligonucleotide
  misc_feature 1..20: note = Target: ANGPTL3; (+) strand; PAM type: YTN; PAM sequence: TTA
  source 1..20: mol_type = other DNA
gtcattcaaagggtctggta

SEQ ID NO: 13868 - DNA, 20 bp, synthetic construct
  misc_feature 1..20: note = Description of Artificial Sequence: Synthetic oligonucleotide
  misc_feature 1..20: note = Target: ANGPTL3; (+) strand; PAM type: YTN; PAM sequence: TTC
  source 1..20: mol_type = other DNA
aaagggtctggtatgataga

SEQ ID NO: 13869 - DNA, 20 bp, synthetic construct
  misc_feature 1..20: note = Description of Artificial Sequence: Synthetic oligonucleotide
  misc_feature 1..20: note = Target: ANGPTL3; (+) strand; PAM type: YTN; PAM sequence: CTG
  source 1..20: mol_type = other DNA
gtatgatagacccaaaatgt

SEQ ID NO: 13870 - DNA, 20 bp, synthetic construct
  misc_feature 1..20: note = Description of Artificial Sequence: Synthetic oligonucleotide
  misc_feature 1..20: note = Target: ANGPTL3; (+) strand; PAM type: YTN; PAM sequence: TTA
  source 1..20: mol_type = other DNA
atagagtcgagatttttatt

SEQ ID NO: 13871 - DNA, 20 bp, synthetic construct
  misc_feature 1..20: note = Description of Artificial Sequence: Synthetic oligonucleotide
  misc_feature 1..20: note = Target: ANGPTL3; (+) strand; PAM type: YTN; PAM sequence: TTT
  source 1..20: mol_type = other DNA
ttattttttataggtttttg

SEQ ID NO: 13872 - DNA, 20 bp, synthetic construct
  misc_feature 1..20: note = Description of Artificial Sequence: Synthetic oligonucleotide
  misc_feature 1..20: note = Target: ANGPTL3; (+) strand; PAM type: YTN; PAM sequence: TTT
  source 1..20: mol_type = other DNA
tattttttataggtttttga

SEQ ID NO: 13873 - DNA, 20 bp, synthetic construct
  misc_feature 1..20: note = Description of Artificial Sequence: Synthetic oligonucleotide
  misc_feature 1..20: note = Target: ANGPTL3; (+) strand; PAM type: YTN; PAM sequence: TTT
  source 1..20: mol_type = other DNA
attttttataggtttttgaa

SEQ ID NO: 13874 - DNA, 20 bp, synthetic construct
  misc_feature 1..20: note = Description of Artificial Sequence: Synthetic oligonucleotide
  misc_feature 1..20: note = Target: ANGPTL3; (+) strand; PAM type: YTN; PAM sequence: TTA
  source 1..20: mol_type = other DNA
ttttttataggtttttgaaa

SEQ ID NO: 13875 - DNA, 20 bp, synthetic construct
  misc_feature 1..20: note = Description of Artificial Sequence: Synthetic oligonucleotide
  misc_feature 1..20: note = Target: ANGPTL3; (+) strand; PAM type: YTN; PAM sequence: TTT
  source 1..20: mol_type = other DNA
tttataggtttttgaaatac

SEQ ID NO: 13876 - DNA, 20 bp, synthetic construct
  misc_feature 1..20: note = Description of Artificial Sequence: Synthetic oligonucleotide
  misc_feature 1..20: note = Target: ANGPTL3; (+) strand; PAM type: YTN; PAM sequence: TTT
  source 1..20: mol_type = other DNA
ttataggtttttgaaatacc

SEQ ID NO: 13877 - DNA, 20 bp, synthetic construct
  misc_feature 1..20: note = Description of Artificial Sequence: Synthetic oligonucleotide
  misc_feature 1..20: note = Target: ANGPTL3; (+) strand; PAM type: YTN; PAM sequence: TTT
  source 1..20: mol_type = other DNA
tataggtttttgaaatacct

SEQ ID NO: 13878 - DNA, 20 bp, synthetic construct
  misc_feature 1..20: note = Description of Artificial Sequence: Synthetic oligonucleotide
  misc_feature 1..20: note = Target: ANGPTL3; (+) strand; PAM type: YTN; PAM sequence: TTT
  source 1..20: mol_type = other DNA
ataggtttttgaaatacctg

SEQ ID NO: 13879 - DNA, 20 bp, synthetic construct
  misc_feature 1..20: note = Description of Artificial Sequence: Synthetic oligonucleotide
  misc_feature 1..20: note = Target: ANGPTL3; (+) strand; PAM type: YTN; PAM sequence: TTA
  source 1..20: mol_type = other DNA
taggtttttgaaatacctga

SEQ ID NO: 13880 - DNA, 20 bp, synthetic construct
  misc_feature 1..20: note = Description of Artificial Sequence: Synthetic oligonucleotide
  misc_feature 1..20: note = Target: ANGPTL3; (+) strand; PAM type: YTN; PAM sequence: TTT
  source 1..20: mol_type = other DNA
ttgaaatacctgaattttca

SEQ ID NO: 13881 - DNA, 20 bp, synthetic construct
  misc_feature 1..20: note = Description of Artificial Sequence: Synthetic oligonucleotide
  misc_feature 1..20: note = Target: ANGPTL3; (+) strand; PAM type: YTN; PAM sequence: TTT
  source 1..20: mol_type = other DNA
tgaaatacctgaattttcac

SEQ ID NO: 13882 - DNA, 20 bp, synthetic construct
  misc_feature 1..20: note = Description of Artificial Sequence: Synthetic oligonucleotide
  misc_feature 1..20: note = Target: ANGPTL3; (+) strand; PAM type: YTN; PAM sequence: TTT
  source 1..20: mol_type = other DNA
gaaatacctgaattttcaca

SEQ ID NO: 13883 - DNA, 20 bp, synthetic construct
  misc_feature 1..20: note = Description of Artificial Sequence: Synthetic oligonucleotide
  misc_feature 1..20: note = Target: ANGPTL3; (+) strand; PAM type: YTN; PAM sequence: TTG
  source 1..20: mol_type = other DNA
aaatacctgaattttcacaa

SEQ ID NO: 13884 - DNA, 20 bp, synthetic construct
  misc_feature 1..20: note = Description of Artificial Sequence: Synthetic oligonucleotide
  misc_feature 1..20: note = Target: ANGPTL3; (+) strand; PAM type: YTN; PAM sequence: CTG
  source 1..20: mol_type = other DNA
aattttcacaataagtactt

SEQ ID NO: 13885 - DNA, 20 bp, synthetic construct
  misc_feature 1..20: note = Description of Artificial Sequence: Synthetic oligonucleotide
  misc_feature 1..20: note = Target: ANGPTL3; (+) strand; PAM type: YTN; PAM sequence: TTT
  source 1..20: mol_type = other DNA
tcacaataagtactttgcac

SEQ ID NO: 13886 - DNA, 20 bp, synthetic construct
  misc_feature 1..20: note = Description of Artificial Sequence: Synthetic oligonucleotide
  misc_feature 1..20: note = Target: ANGPTL3; (+) strand; PAM type: YTN; PAM sequence: TTT
  source 1..20: mol_type = other DNA
cacaataagtactttgcaca

SEQ ID NO: 13887 - DNA, 20 bp, synthetic construct
  misc_feature 1..20: note = Description of Artificial Sequence: Synthetic oligonucleotide
  misc_feature 1..20: note = Target: ANGPTL3; (+) strand; PAM type: YTN; PAM sequence: TTC
  source 1..20: mol_type = other DNA
acaataagtactttgcacat

SEQ ID NO: 13888 - DNA, 20 bp, synthetic construct
  misc_feature 1..20: note = Description of Artificial Sequence: Synthetic oligonucleotide
  misc_feature 1..20: note = Target: ANGPTL3; (+) strand; PAM type: YTN; PAM sequence: CTT
  source 1..20: mol_type = other DNA
tgcacattaaaaatcttagc

SEQ ID NO: 13889 - DNA, 20 bp, synthetic construct
  misc_feature 1..20: note = Description of Artificial Sequence: Synthetic oligonucleotide
  misc_feature 1..20: note = Target: ANGPTL3; (+) strand; PAM type: YTN; PAM sequence: TTT
  source 1..20: mol_type = other DNA
gcacattaaaaatcttagct

SEQ ID NO: 13890 - DNA, 20 bp, synthetic construct
  misc_feature 1..20: note = Description of Artificial Sequence: Synthetic oligonucleotide
  misc_feature 1..20: note = Target: ANGPTL3; (+) strand; PAM type: YTN; PAM sequence: TTG
  source 1..20: mol_type = other DNA
cacattaaaaatcttagctg

SEQ ID NO: 13891 - DNA, 20 bp, synthetic construct
  misc_feature 1..20: note = Description of Artificial Sequence: Synthetic oligonucleotide
  misc_feature 1..20: note = Target: ANGPTL3; (+) strand; PAM type: YTN; PAM sequence: TTA
  source 1..20: mol_type = other DNA
aaaatcttagctgggcatgg

SEQ ID NO: 13892 - DNA, 20 bp, synthetic construct
  misc_feature 1..20: note = Description of Artificial Sequence: Synthetic oligonucleotide
  misc_feature 1..20: note = Target: ANGPTL3; (+) strand; PAM type: YTN; PAM sequence: CTT
  source 1..20: mol_type = other DNA
agctgggcatggtggctcac

SEQ ID NO: 13893 - DNA, 20 bp, synthetic construct
  misc_feature 1..20: note = Description of Artificial Sequence: Synthetic oligonucleotide
  misc_feature 1..20: note = Target: ANGPTL3; (+) strand; PAM type: YTN; PAM sequence: TTA
  source 1..20: mol_type = other DNA
gctgggcatggtggctcacg

SEQ ID NO: 13894 - DNA, 20 bp, synthetic construct
  misc_feature 1..20: note = Description of Artificial Sequence: Synthetic oligonucleotide
  misc_feature 1..20: note = Target: ANGPTL3; (+) strand; PAM type: YTN; PAM sequence: CTG
  source 1..20: mol_type = other DNA
ggcatggtggctcacgcttg

SEQ ID NO: 13895 - DNA, 20 bp, synthetic construct
  misc_feature 1..20: note = Description of Artificial Sequence: Synthetic oligonucleotide
  misc_feature 1..20: note = Target: ANGPTL3; (+) strand; PAM type: YTN; PAM sequence: CTC
  source 1..20: mol_type = other DNA
acgcttgtaatcccagcact

SEQ ID NO: 13896 - DNA, 20 bp, synthetic construct
  misc_feature 1..20: note = Description of Artificial Sequence: Synthetic oligonucleotide
  misc_feature 1..20: note = Target: ANGPTL3; (+) strand; PAM type: YTN; PAM sequence: CTT
  source 1..20: mol_type = other DNA
gtaatcccagcactctggga

SEQ ID NO: 13897 - DNA, 20 bp, synthetic construct
  misc_feature 1..20: note = Description of Artificial Sequence: Synthetic oligonucleotide
  misc_feature 1..20: note = Target: ANGPTL3; (+) strand; PAM type: YTN; PAM sequence: TTG
  source 1..20: mol_type = other DNA
taatcccagcactctgggag

SEQ ID NO: 13898 - DNA, 20 bp, synthetic construct
  misc_feature 1..20: note = Description of Artificial Sequence: Synthetic oligonucleotide
  misc_feature 1..20: note = Target: ANGPTL3; (+) strand; PAM type: YTN; PAM sequence: CTC
  source 1..20: mol_type = other DNA
tgggaggccaaggtaggcag

SEQ ID NO: 13899 - DNA, 20 bp, synthetic construct
  misc_feature 1..20: note = Description of Artificial Sequence: Synthetic oligonucleotide
  misc_feature 1..20: note = Target: ANGPTL3; (+) strand; PAM type: YTN; PAM sequence: CTG
  source 1..20: mol_type = other DNA
ggaggccaaggtaggcagat

SEQ ID NO: 13900 - DNA, 20 bp, synthetic construct
  misc_feature 1..20: note = Description of Artificial Sequence: Synthetic oligonucleotide
  misc_feature 1..20: note = Target: ANGPTL3; (+) strand; PAM type: YTN; PAM sequence: CTG
  source 1..20: mol_type = other DNA
aggtcaggagttcgagacca

SEQ ID NO: 13901 - DNA, 20 bp, synthetic construct
  misc_feature 1..20: note = Description of Artificial Sequence: Synthetic oligonucleotide
  misc_feature 1..20: note = Target: ANGPTL3; (+) strand; PAM type: YTN; PAM sequence: TTC
  source 1..20: mol_type = other DNA
gagaccagtctggccaacat

SEQ ID NO: 13902 - DNA, 20 bp, synthetic construct
  misc_feature 1..20: note = Description of Artificial Sequence: Synthetic oligonucleotide
  misc_feature 1..20: note = Target: ANGPTL3; (+) strand; PAM type: YTN; PAM sequence: CTG
  source 1..20: mol_type = other DNA
gccaacatggtgaaaccccg

SEQ ID NO: 13903 - DNA, 20 bp, synthetic construct
  misc_feature 1..20: note = Description of Artificial Sequence: Synthetic oligonucleotide
  misc_feature 1..20: note = Target: ANGPTL3; (+) strand; PAM type: YTN; PAM sequence: CTC
  source 1..20: mol_type = other DNA
tactaaaaatacaaaaatta

SEQ ID NO: 13904 - DNA, 20 bp, synthetic construct
  misc_feature 1..20: note = Description of Artificial Sequence: Synthetic oligonucleotide
  misc_feature 1..20: note = Target: ANGPTL3; (+) strand; PAM type: YTN; PAM sequence: CTA
  source 1..20: mol_type = other DNA
ctaaaaatacaaaaattagc

SEQ ID NO: 13905 - DNA, 20 bp, synthetic construct
  misc_feature 1..20: note = Description of Artificial Sequence: Synthetic oligonucleotide
  misc_feature 1..20: note = Target: ANGPTL3; (+) strand; PAM type: YTN; PAM sequence: CTA
  source 1..20: mol_type = other DNA
aaaatacaaaaattagccag

SEQ ID NO: 13906 - DNA, 20 bp, synthetic construct
  misc_feature 1..20: note = Description of Artificial Sequence: Synthetic oligonucleotide
  misc_feature 1..20: note = Target: ANGPTL3; (+) strand; PAM type: YTN; PAM sequence: TTA
  source 1..20: mol_type = other DNA
gccaggcttggttgggggtg

SEQ ID NO: 13907 - DNA, 20 bp, synthetic construct
  misc_feature 1..20: note = Description of Artificial Sequence: Synthetic oligonucleotide
  misc_feature 1..20: note = Target: ANGPTL3; (+) strand; PAM type: YTN; PAM sequence: CTT
  source 1..20: mol_type = other DNA
ggttgggggtgcctgtaatt

SEQ ID NO: 13908 - DNA, 20 bp, synthetic construct
  misc_feature 1..20: note = Description of Artificial Sequence: Synthetic oligonucleotide
  misc_feature 1..20: note = Target: ANGPTL3; (+) strand; PAM type: YTN; PAM sequence: TTG
  source 1..20: mol_type = other DNA
gttgggggtgcctgtaattc

SEQ ID NO: 13909 - DNA, 20 bp, synthetic construct
  misc_feature 1..20: note = Description of Artificial Sequence: Synthetic oligonucleotide
  misc_feature 1..20: note = Target: ANGPTL3; (+) strand; PAM type: YTN; PAM sequence: TTG
  source 1..20: mol_type = other DNA
ggggtgcctgtaattccaga

SEQ ID NO: 13910 - DNA, 20 bp, synthetic construct
  misc_feature 1..20: note = Description of Artificial Sequence: Synthetic oligonucleotide
  misc_feature 1..20: note = Target: ANGPTL3; (+) strand; PAM type: YTN; PAM sequence: CTG
  source 1..20: mol_type = other DNA
taattccagatactcgggaa

SEQ ID NO: 13911 - DNA, 20 bp, synthetic construct
  misc_feature 1..20: note = Description of Artificial Sequence: Synthetic oligonucleotide
  misc_feature 1..20: note = Target: ANGPTL3; (+) strand; PAM type: YTN; PAM sequence: TTC
  source 1..20: mol_type = other DNA
cagatactcgggaagctgag

SEQ ID NO: 13912 - DNA, 20 bp, synthetic construct
  misc_feature 1..20: note = Description of Artificial Sequence: Synthetic oligonucleotide
  misc_feature 1..20: note = Target: ANGPTL3; (+) strand; PAM type: YTN; PAM sequence: CTC
  source 1..20: mol_type = other DNA
gggaagctgagacaggagaa

SEQ ID NO: 13913 - DNA, 20 bp, synthetic construct
  misc_feature 1..20: note = Description of Artificial Sequence: Synthetic oligonucleotide
  misc_feature 1..20: note = Target: ANGPTL3; (+) strand; PAM type: YTN; PAM sequence: CTG
  source 1..20: mol_type = other DNA
agacaggagaatcgcttgaa

SEQ ID NO: 13914 - DNA, 20 bp, synthetic construct
  misc_feature 1..20: note = Description of Artificial Sequence: Synthetic oligonucleotide
  misc_feature 1..20: note = Target: ANGPTL3; (+) strand; PAM type: YTN; PAM sequence: CTT
  source 1..20: mol_type = other DNA
gaacccaggagggggaagtt

SEQ ID NO: 13915 - DNA, 20 bp, synthetic construct
  misc_feature 1..20: note = Description of Artificial Sequence: Synthetic oligonucleotide
  misc_feature 1..20: note = Target: ANGPTL3; (+) strand; PAM type: YTN; PAM sequence: TTG
  source 1..20: mol_type = other DNA
aacccaggagggggaagttg

SEQ ID NO: 13916 - DNA, 20 bp, synthetic construct
  misc_feature 1..20: note = Description of Artificial Sequence: Synthetic oligonucleotide
  misc_feature 1..20: note = Target: ANGPTL3; (+) strand; PAM type: YTN; PAM sequence: TTG
  source 1..20: mol_type = other DNA
cagtgagctgagatcacgac

SEQ ID NO: 13917 - DNA, 20 bp, synthetic construct
  misc_feature 1..20: note = Description of Artificial Sequence: Synthetic oligonucleotide
  misc_feature 1..20: note = Target: ANGPTL3; (+) strand; PAM type: YTN; PAM sequence: CTG
  source 1..20: mol_type = other DNA
agatcacgacgctgcactcc

SEQ ID NO: 13918 - DNA, 20 bp, synthetic construct
  misc_feature 1..20: note = Description of Artificial Sequence: Synthetic oligonucleotide
  misc_feature 1..20: note = Target: ANGPTL3; (+) strand; PAM type: YTN; PAM sequence: CTG
  source 1..20: mol_type = other DNA
cactccagcctgggcaacaa

SEQ ID NO: 13919 - DNA, 20 bp, synthetic construct
  misc_feature 1..20: note = Description of Artificial Sequence: Synthetic oligonucleotide
  misc_feature 1..20: note = Target: ANGPTL3; (+) strand; PAM type: YTN; PAM sequence: CTC
  source 1..20: mol_type = other DNA
cagcctgggcaacaaagagc

SEQ ID NO: 13920 - DNA, 20 bp, synthetic construct
  misc_feature 1..20: note = Description of Artificial Sequence: Synthetic oligonucleotide
  misc_feature 1..20: note = Target: ANGPTL3; (+) strand; PAM type: YTN; PAM sequence: CTG
  source 1..20: mol_type = other DNA
ggcaacaaagagcaaaactc

SEQ ID NO: 13921 - DNA, 20 bp, synthetic construct
  misc_feature 1..20: note = Description of Artificial Sequence: Synthetic oligonucleotide
  misc_feature 1..20: note = Target: ANGPTL3; (+) strand; PAM type: YTN; PAM sequence: CTC
  source 1..20: mol_type = other DNA
cgtctcaaaaataaataaag

SEQ ID NO: 13922 - DNA, 20 bp, synthetic construct
  misc_feature 1..20: note = Description of Artificial Sequence: Synthetic oligonucleotide
  misc_feature 1..20: note = Target: ANGPTL3; (+) strand; PAM type: YTN; PAM sequence: CTC
  source 1..20: mol_type = other DNA
aaaaataaataaagaaaaaa

SEQ ID NO: 13923 - DNA, 20 bp, synthetic construct
  misc_feature 1..20: note = Description of Artificial Sequence: Synthetic oligonucleotide
  misc_feature 1..20: note = Target: ANGPTL3; (+) strand; PAM type: YTN; PAM sequence: CTT
  source 1..20: mol_type = other DNA
tacatgtccaaagatacggc

SEQ ID NO: 13924 - DNA, 20 bp, synthetic construct
  misc_feature 1..20: note = Description of Artificial Sequence: Synthetic oligonucleotide
  misc_feature 1..20: note = Target: ANGPTL3; (+) strand; PAM type: YTN; PAM sequence: TTT
  source 1..20: mol_type = other DNA
acatgtccaaagatacggct

SEQ ID NO: 13925 - DNA, 20 bp, synthetic construct
  misc_feature 1..20: note = Description of Artificial Sequence: Synthetic oligonucleotide
  misc_feature 1..20: note = Target: ANGPTL3; (+) strand; PAM type: YTN; PAM sequence: TTA
  source 1..20: mol_type = other DNA
catgtccaaagatacggctg

SEQ ID NO: 13926 - DNA, 20 bp, synthetic construct
  misc_feature 1..20: note = Description of Artificial Sequence: Synthetic oligonucleotide
  misc_feature 1..20: note = Target: ANGPTL3; (+) strand; PAM type: YTN; PAM sequence: CTG
  source 1..20: mol_type = other DNA
ttcaactaaaaaatatatat

SEQ ID NO: 13927 - DNA, 20 bp, synthetic construct
  misc_feature 1..20: note = Description of Artificial Sequence: Synthetic oligonucleotide
  misc_feature 1..20: note = Target: ANGPTL3; (+) strand; PAM type: YTN; PAM sequence: TTC
  source 1..20: mol_type = other DNA
aactaaaaaatatatatgta

SEQ ID NO: 13928 - DNA, 20 bp, synthetic construct
  misc_feature 1..20: note = Description of Artificial Sequence: Synthetic oligonucleotide
  misc_feature 1..20: note = Target: ANGPTL3; (+) strand; PAM type: YTN; PAM sequence: CTA
  source 1..20: mol_type = other DNA
aaaaatatatatgtataaaa

SEQ ID NO: 13929 - DNA, 20 bp, synthetic construct
  misc_feature 1..20: note = Description of Artificial Sequence: Synthetic oligonucleotide
  misc_feature 1..20: note = Target: ANGPTL3; (+) strand; PAM type: YTN; PAM sequence: CTT
  source 1..20: mol_type = other DNA
aacatgttaatagtgaacac

SEQ ID NO: 13930 - DNA, 20 bp, synthetic construct
  misc_feature 1..20: note = Description of Artificial Sequence: Synthetic oligonucleotide
  misc_feature 1..20: note = Target: ANGPTL3; (+) strand; PAM type: YTN; PAM sequence: TTA
  source 1..20: mol_type = other DNA
acatgttaatagtgaacaca

SEQ ID NO: 13931 - DNA, 20 bp, synthetic construct
  misc_feature 1..20: note = Description of Artificial Sequence: Synthetic oligonucleotide
  misc_feature 1..20: note = Target: ANGPTL3; (+) strand; PAM type: YTN; PAM sequence: TTA
  source 1..20: mol_type = other DNA
atagtgaacacacaaaacag

SEQ ID NO: 13932 - DNA, 20 bp, synthetic construct
  misc_feature 1..20: note = Description of Artificial Sequence: Synthetic oligonucleotide
  misc_feature 1..20: note = Target: ANGPTL3; (+) strand; PAM type: YTN; PAM sequence: TTA
  source 1..20: mol_type = other DNA
ttccttcaaagctcacttaa

SEQ ID NO: 13933 - DNA, 20 bp, synthetic construct
  misc_feature 1..20: note = Description of Artificial Sequence: Synthetic oligonucleotide
  misc_feature 1..20: note = Target: ANGPTL3; (+) strand; PAM type: YTN; PAM sequence: TTC
  source 1..20: mol_type = other DNA
cttcaaagctcacttaacct

SEQ ID NO: 13934 - DNA, 20 bp, synthetic construct
  misc_feature 1..20: note = Description of Artificial Sequence: Synthetic oligonucleotide
  misc_feature 1..20: note = Target: ANGPTL3; (+) strand; PAM type: YTN; PAM sequence: CTT
  source 1..20: mol_type = other DNA
caaagctcacttaacctctg

SEQ ID NO: 13935 - DNA, 20 bp, synthetic construct
  misc_feature 1..20: note = Description of Artificial Sequence: Synthetic oligonucleotide
  misc_feature 1..20: note = Target: ANGPTL3; (+) strand; PAM type: YTN; PAM sequence: TTC
  source 1..20: mol_type = other DNA
aaagctcacttaacctctgg

SEQ ID NO: 13936 - DNA, 20 bp, synthetic construct
  misc_feature 1..20: note = Description of Artificial Sequence: Synthetic oligonucleotide
  misc_feature 1..20: note = Target: ANGPTL3; (+) strand; PAM type: YTN; PAM sequence: CTC
  source 1..20: mol_type = other DNA
acttaacctctggatctaca

SEQ ID NO: 13937 - DNA, 20 bp, synthetic construct
  misc_feature 1..20: note = Description of Artificial Sequence: Synthetic oligonucleotide
  misc_feature 1..20: note = Target: ANGPTL3; (+) strand; PAM type: YTN; PAM sequence: CTT
  source 1..20: mol_type = other DNA
aacctctggatctacactgt

SEQ ID NO: 13938 - DNA, 20 bp, synthetic construct
  misc_feature 1..20: note = Description of Artificial Sequence: Synthetic oligonucleotide
  misc_feature 1..20: note = Target: ANGPTL3; (+) strand; PAM type: YTN; PAM sequence: TTA
  source 1..20: mol_type = other DNA
acctctggatctacactgtc

SEQ ID NO: 13939 - DNA, 20 bp, synthetic construct
  misc_feature 1..20: note = Description of Artificial Sequence: Synthetic oligonucleotide
  misc_feature 1..20: note = Target: ANGPTL3; (+) strand; PAM type: YTN; PAM sequence: CTC
  source 1..20: mol_type = other DNA
tggatctacactgtccaaaa

SEQ ID NO: 13940 - DNA, 20 bp, synthetic construct
  misc_feature 1..20: note = Description of Artificial Sequence: Synthetic oligonucleotide
  misc_feature 1..20: note = Target: ANGPTL3; (+) strand; PAM type: YTN; PAM sequence: CTG
  source 1..20: mol_type = other DNA
gatctacactgtccaaaaag

SEQ ID NO: 13941 - DNA, 20 bp, synthetic construct
  misc_feature 1..20: note = Description of Artificial Sequence: Synthetic oligonucleotide
  misc_feature 1..20: note = Target: ANGPTL3; (+) strand; PAM type: YTN; PAM sequence: CTA
  source 1..20: mol_type = other DNA
cactgtccaaaaagacggtc

SEQ ID NO: 13942 - DNA, 20 bp, synthetic construct
  misc_feature 1..20: note = Description of Artificial Sequence: Synthetic oligonucleotide
  misc_feature 1..20: note = Target: ANGPTL3; (+) strand; PAM type: YTN; PAM sequence: CTG
  source 1..20: mol_type = other DNA
tccaaaaagacggtctaatg

SEQ ID NO: 13943 - DNA, 20 bp, synthetic construct
  misc_feature 1..20: note = Description of Artificial Sequence: Synthetic oligonucleotide
  misc_feature 1..20: note = Target: ANGPTL3; (+) strand; PAM type: YTN; PAM sequence: CTA
  source 1..20: mol_type = other DNA
atgagacaattgagcacttg

SEQ ID NO: 13944 - DNA, 20 bp, synthetic construct
  misc_feature 1..20: note = Description of Artificial Sequence: Synthetic oligonucleotide
  misc_feature 1..20: note = Target: ANGPTL3; (+) strand; PAM type: YTN; PAM sequence: TTG
  source 1..20: mol_type = other DNA
agcacttgataggtgagtgg

SEQ ID NO: 13945 - DNA, 20 bp, synthetic construct
  misc_feature 1..20: note = Description of Artificial Sequence: Synthetic oligonucleotide
  misc_feature 1..20: note = Target: ANGPTL3; (+) strand; PAM type: YTN; PAM sequence: CTT
  source 1..20: mol_type = other DNA
gataggtgagtggttctaac

SEQ ID NO: 13946 - DNA, 20 bp, synthetic construct
  misc_feature 1..20: note = Description of Artificial Sequence: Synthetic oligonucleotide
  misc_feature 1..20: note = Target: ANGPTL3; (+) strand; PAM type: YTN; PAM sequence: TTG
  source 1..20: mol_type = other DNA
ataggtgagtggttctaact

SEQ ID NO: 13947 - DNA, 20 bp, synthetic construct
  misc_feature 1..20: note = Description of Artificial Sequence: Synthetic oligonucleotide
  misc_feature 1..20: note = Target: ANGPTL3; (+) strand; PAM type: YTN; PAM sequence: TTC
  source 1..20: mol_type = other DNA
taactgagatatgttctcag

SEQ ID NO: 13948 - DNA, 20 bp, synthetic construct
  misc_feature 1..20: note = Description of Artificial Sequence: Synthetic oligonucleotide
  misc_feature 1..20: note = Target: ANGPTL3; (+) strand; PAM type: YTN; PAM sequence: CTA
  source 1..20: mol_type = other DNA
actgagatatgttctcagta

SEQ ID NO: 13949 - DNA, 20 bp, synthetic construct
  misc_feature 1..20: note = Description of Artificial Sequence: Synthetic oligonucleotide
  misc_feature 1..20: note = Target: ANGPTL3; (+) strand; PAM type: YTN; PAM sequence: CTG
  source 1..20: mol_type = other DNA
agatatgttctcagtataaa

SEQ ID NO: 13950 - DNA, 20 bp, synthetic construct
  misc_feature 1..20: note = Description of Artificial Sequence: Synthetic oligonucleotide
  misc_feature 1..20: note = Target: ANGPTL3; (+) strand; PAM type: YTN; PAM sequence: TTC
  source 1..20: mol_type = other DNA
tcagtataaaacatacaata

SEQ ID NO: 13951 - DNA, 20 bp, synthetic construct
  misc_feature 1..20: note = Description of Artificial Sequence: Synthetic oligonucleotide
  misc_feature 1..20: note = Target: ANGPTL3; (+) strand; PAM type: YTN; PAM sequence: CTC
  source 1..20: mol_type = other DNA
agtataaaacatacaatagg

SEQ ID NO: 13952 - DNA, 20 bp, synthetic construct
  misc_feature 1..20: note = Description of Artificial Sequence: Synthetic oligonucleotide
  misc_feature 1..20: note = Target: ANGPTL3; (+) strand; PAM type: YTN; PAM sequence: CTT
  source 1..20: mol_type = other DNA
cctatacaacattaattaaa

SEQ ID NO: 13953 - DNA, 20 bp, synthetic construct
  misc_feature 1..20: note = Description of Artificial Sequence: Synthetic oligonucleotide
  misc_feature 1..20: note = Target: ANGPTL3; (+) strand; PAM type: YTN; PAM sequence: TTC
  source 1..20: mol_type = other DNA
ctatacaacattaattaaaa

SEQ ID NO: 13954 - DNA, 20 bp, synthetic construct
  misc_feature 1..20: note = Description of Artificial Sequence: Synthetic oligonucleotide
  misc_feature 1..20: note = Target: ANGPTL3; (+) strand; PAM type: YTN; PAM sequence: CTA
  source 1..20: mol_type = other DNA
tacaacattaattaaaaaac

SEQ ID NO: 13955 - DNA, 20 bp, synthetic construct
  misc_feature 1..20: note = Description of Artificial Sequence: Synthetic oligonucleotide
  misc_feature 1..20: note = Target: ANGPTL3; (+) strand; PAM type: YTN; PAM sequence: TTA
  source 1..20: mol_type = other DNA
attaaaaaacaaactattgt

SEQ ID NO: 13956 - DNA, 20 bp, synthetic construct
  misc_feature 1..20: note = Description of Artificial Sequence: Synthetic oligonucleotide
  misc_feature 1..20: note = Target: ANGPTL3; (+) strand; PAM type: YTN; PAM sequence: TTA
  source 1..20: mol_type = other DNA
aaaaacaaactattgtagtt

SEQ ID NO: 13957 - DNA, 20 bp, synthetic construct
  misc_feature 1..20: note = Description of Artificial Sequence: Synthetic oligonucleotide
  misc_feature 1..20: note = Target: ANGPTL3; (+) strand; PAM type: YTN; PAM sequence: CTA
  source 1..20: mol_type = other DNA
ttgtagttaaaaaggaaaaa

SEQ ID NO: 13958 - DNA, 20 bp, synthetic construct
  misc_feature 1..20: note = Description of Artificial Sequence: Synthetic oligonucleotide
  misc_feature 1..20: note = Target: ANGPTL3; (+) strand; PAM type: YTN; PAM sequence: TTG
  source 1..20: mol_type = other DNA
tagttaaaaaggaaaaaatt

SEQ ID NO: 13959 - DNA, 20 bp, synthetic construct
  misc_feature 1..20: note = Description of Artificial Sequence: Synthetic oligonucleotide
  misc_feature 1..20: note = Target: ANGPTL3; (+) strand; PAM type: YTN; PAM sequence: TTA
  source 1..20: mol_type = other DNA
aaaaggaaaaaattagagat

SEQ ID NO: 13960 - DNA, 20 bp, synthetic construct
  misc_feature 1..20: note = Description of Artificial Sequence: Synthetic oligonucleotide
  misc_feature 1..20: note = Target: ANGPTL3; (+) strand; PAM type: YTN; PAM sequence: TTA
  source 1..20: mol_type = other DNA
gagatactatgtaaaaaaga

SEQ ID NO: 13961 - DNA, 20 bp, synthetic construct
  misc_feature 1..20: note = Description of Artificial Sequence: Synthetic oligonucleotide
  misc_feature 1..20: note = Target: ANGPTL3; (+) strand; PAM type: YTN; PAM sequence: CTA
  source 1..20: mol_type = other DNA
tgtaaaaaagagccaaaata

SEQ ID NO: 13962 - DNA, 20 bp, synthetic construct
  misc_feature 1..20: note = Description of Artificial Sequence: Synthetic oligonucleotide
  misc_feature 1..20: note = Target: ANGPTL3; (+) strand; PAM type: YTN; PAM sequence: CTT
  source 1..20: mol_type = other DNA
gtattttatttgaaagacat

SEQ ID NO: 13963 - DNA, 20 bp, synthetic construct
  misc_feature 1..20: note = Description of Artificial Sequence: Synthetic oligonucleotide
  misc_feature 1..20: note = Target: ANGPTL3; (+) strand; PAM type: YTN; PAM sequence: TTG
  source 1..20: mol_type = other DNA
tattttatttgaaagacata

SEQ ID NO: 13964 - DNA, 20 bp, synthetic construct
  misc_feature 1..20: note = Description of Artificial Sequence: Synthetic oligonucleotide
  misc_feature 1..20: note = Target: ANGPTL3; (+) strand; PAM type: YTN; PAM sequence: TTT
  source 1..20: mol_type = other DNA
tatttgaaagacatatctcc

SEQ ID NO: 13965 - DNA, 20 bp, synthetic construct
  misc_feature 1..20: note = Description of Artificial Sequence: Synthetic oligonucleotide
  misc_feature 1..20: note = Target: ANGPTL3; (+) strand; PAM type: YTN; PAM sequence: TTT
  source 1..20: mol_type = other DNA
atttgaaagacatatctcca

SEQ ID NO: 13966 - DNA, 20 bp, synthetic construct
  misc_feature 1..20: note = Description of Artificial Sequence: Synthetic oligonucleotide
  misc_feature 1..20: note = Target: ANGPTL3; (+) strand; PAM type: YTN; PAM sequence: TTA
  source 1..20: mol_type = other DNA
tttgaaagacatatctccat

SEQ ID NO: 13967 - DNA, 20 bp, synthetic construct
  misc_feature 1..20: note = Description of Artificial Sequence: Synthetic oligonucleotide
  misc_feature 1..20: note = Target: ANGPTL3; (+) strand; PAM type: YTN; PAM sequence: TTT
  source 1..20: mol_type = other DNA
gaaagacatatctccataag

SEQ ID NO: 13968 - DNA, 20 bp, synthetic construct
  misc_feature 1..20: note = Description of Artificial Sequence: Synthetic oligonucleotide
  misc_feature 1..20: note = Target: ANGPTL3; (+) strand; PAM type: YTN; PAM sequence: TTG
  source 1..20: mol_type = other DNA
aaagacatatctccataaga

SEQ ID NO: 13969 - DNA, 20 bp, synthetic construct
  misc_feature 1..20: note = Description of Artificial Sequence: Synthetic oligonucleotide
  misc_feature 1..20: note = Target: ANGPTL3; (+) strand; PAM type: YTN; PAM sequence: CTC
  source 1..20: mol_type = other DNA
cataagattacacaacctcg

SEQ ID NO: 13970 - DNA, 20 bp, synthetic construct
  misc_feature 1..20: note = Description of Artificial Sequence: Synthetic oligonucleotide
  misc_feature 1..20: note = Target: ANGPTL3; (+) strand; PAM type: YTN; PAM sequence: TTA
  source 1..20: mol_type = other DNA
cacaacctcgtgtaggataa

SEQ ID NO: 13971 - DNA, 20 bp, synthetic construct
  misc_feature 1..20: note = Description of Artificial Sequence: Synthetic oligonucleotide
  misc_feature 1..20: note = Target: ANGPTL3; (+) strand; PAM type: YTN; PAM sequence: CTC
  source 1..20: mol_type = other DNA
gtgtaggataaaggactttg

SEQ ID NO: 13972 - DNA, 20 bp, synthetic construct
  misc_feature 1..20: note = Description of Artificial Sequence: Synthetic oligonucleotide
  misc_feature 1..20: note = Target: ANGPTL3; (+) strand; PAM type: YTN; PAM sequence: CTT
  source 1..20: mol_type = other DNA
tgctttgcttggaatttaaa

SEQ ID NO: 13973 - DNA, 20 bp, synthetic construct
  misc_feature 1..20: note = Description of Artificial Sequence: Synthetic oligonucleotide
  misc_feature 1..20: note = Target: ANGPTL3; (+) strand; PAM type: YTN; PAM sequence: TTT
  source 1..20: mol_type = other DNA
gctttgcttggaatttaaac

SEQ ID NO: 13974 - DNA, 20 bp, synthetic construct
  misc_feature 1..20: note = Description of Artificial Sequence: Synthetic oligonucleotide
  misc_feature 1..20: note = Target: ANGPTL3; (+) strand; PAM type: YTN; PAM sequence: TTG
  source 1..20: mol_type = other DNA
ctttgcttggaatttaaaca

SEQ ID NO: 13975 - DNA, 20 bp, synthetic construct
  misc_feature 1..20: note = Description of Artificial Sequence: Synthetic oligonucleotide
  misc_feature 1..20: note = Target: ANGPTL3; (+) strand; PAM type: YTN; PAM sequence: CTT
  source 1..20: mol_type = other DNA
tgcttggaatttaaacaatt

SEQ ID NO: 13976 - DNA, 20 bp, synthetic construct
  misc_feature 1..20: note = Description of Artificial Sequence: Synthetic oligonucleotide
  misc_feature 1..20: note = Target: ANGPTL3; (+) strand; PAM type: YTN; PAM sequence: TTT
  source 1..20: mol_type = other DNA
gcttggaatttaaacaattt

SEQ ID NO: 13977 - DNA, 20 bp, synthetic construct
  misc_feature 1..20: note = Description of Artificial Sequence: Synthetic oligonucleotide
  misc_feature 1..20: note = Target: ANGPTL3; (+) strand; PAM type: YTN; PAM sequence: TTG
  source 1..20: mol_type = other DNA
cttggaatttaaacaattta

SEQ ID NO: 13978 - DNA, 20 bp, synthetic construct
  misc_feature 1..20: note = Description of Artificial Sequence: Synthetic oligonucleotide
  misc_feature 1..20: note = Target: ANGPTL3; (+) strand; PAM type: YTN; PAM sequence: CTT
  source 1..20: mol_type = other DNA
ggaatttaaacaatttaggc

SEQ ID NO: 13979 - DNA, 20 bp, synthetic construct
  misc_feature 1..20: note = Description of Artificial Sequence: Synthetic oligonucleotide
  misc_feature 1..20: note = Target: ANGPTL3; (+) strand; PAM type: YTN; PAM sequence: TTG
  source 1..20: mol_type = other DNA
gaatttaaacaatttaggct

SEQ ID NO: 13980 - DNA, 20 bp, synthetic construct
  misc_feature 1..20: note = Description of Artificial Sequence: Synthetic oligonucleotide
  misc_feature 1..20: note = Target: ANGPTL3; (+) strand; PAM type: YTN; PAM sequence: TTT
  source 1..20: mol_type = other DNA
aaacaatttaggctcttaaa

SEQ ID NO: 13981 - DNA, 20 bp, synthetic construct
  misc_feature 1..20: note = Description of Artificial Sequence: Synthetic oligonucleotide
  misc_feature 1..20: note = Target: ANGPTL3; (+) strand; PAM type: YTN; PAM sequence: TTA
  source 1..20: mol_type = other DNA
aacaatttaggctcttaaat

SEQ ID NO: 13982 - DNA, 20 bp, synthetic construct
  misc_feature 1..20: note = Description of Artificial Sequence: Synthetic oligonucleotide
  misc_feature 1..20: note = Target: ANGPTL3; (+) strand; PAM type: YTN; PAM sequence: TTT
  source 1..20: mol_type = other DNA
aggctcttaaatgtcctaaa

SEQ ID NO: 13983 - DNA, 20 bp, synthetic construct
  misc_feature 1..20: note = Description of Artificial Sequence: Synthetic oligonucleotide
  misc_feature 1..20: note = Target: ANGPTL3; (+) strand; PAM type: YTN; PAM sequence: TTA
  source 1..20: mol_type = other DNA
ggctcttaaatgtcctaaaa

SEQ ID NO: 13984 - DNA, 20 bp, synthetic construct
  misc_feature 1..20: note = Description of Artificial Sequence: Synthetic oligonucleotide
  misc_feature 1..20: note = Target: ANGPTL3; (+) strand; PAM type: YTN; PAM sequence: CTC
  source 1..20: mol_type = other DNA
ttaaatgtcctaaaattctc

SEQ ID NO: 13985 - DNA, 20 bp, synthetic construct
  misc_feature 1..20: note = Description of Artificial Sequence: Synthetic oligonucleotide
  misc_feature 1..20: note = Target: ANGPTL3; (+) strand; PAM type: YTN; PAM sequence: CTT
  source 1..20: mol_type = other DNA
aaatgtcctaaaattctctg

SEQ ID NO: 13986 - DNA, 20 bp, synthetic construct
  misc_feature 1..20: note = Description of Artificial Sequence: Synthetic oligonucleotide
  misc_feature 1..20: note = Target: ANGPTL3; (+) strand; PAM type: YTN; PAM sequence: TTA
  source 1..20: mol_type = other DNA
aatgtcctaaaattctctgt

SEQ ID NO: 13987 - DNA, 20 bp, synthetic construct
  misc_feature 1..20: note = Description of Artificial Sequence: Synthetic oligonucleotide
  misc_feature 1..20: note = Target: ANGPTL3; (+) strand; PAM type: YTN; PAM sequence: CTA
  source 1..20: mol_type = other DNA
aaattctctgtagctaagaa

SEQ ID NO: 13988 - DNA, 20 bp, synthetic construct
  misc_feature 1..20: note = Description of Artificial Sequence: Synthetic oligonucleotide
  misc_feature 1..20: note = Target: ANGPTL3; (+) strand; PAM type: YTN; PAM sequence: TTC
  source 1..20: mol_type = other DNA
tctgtagctaagaaattttt

SEQ ID NO: 13989 - DNA, 20 bp, synthetic construct
  misc_feature 1..20: note = Description of Artificial Sequence: Synthetic oligonucleotide
  misc_feature 1..20: note = Target: ANGPTL3; (+) strand; PAM type: YTN; PAM sequence: CTC
  source 1..20: mol_type = other DNA
tgtagctaagaaatttttat

SEQ ID NO: 13990 - DNA, 20 bp, synthetic construct
  misc_feature 1..20: note = Description of Artificial Sequence: Synthetic oligonucleotide
  misc_feature 1..20: note = Target: ANGPTL3; (+) strand; PAM type: YTN; PAM sequence: CTG
  source 1..20: mol_type = other DNA
tagctaagaaatttttatat

SEQ ID NO: 13991 - DNA, 20 bp, synthetic construct
  misc_feature 1..20: note = Description of Artificial Sequence: Synthetic oligonucleotide
  misc_feature 1..20: note = Target: ANGPTL3; (+) strand; PAM type: YTN; PAM sequence: CTA
  source 1..20: mol_type = other DNA
agaaatttttatattggttc

SEQ ID NO: 13992 - DNA, 20 bp, synthetic construct
  misc_feature 1..20: note = Description of Artificial Sequence: Synthetic oligonucleotide
  misc_feature 1..20: note = Target: ANGPTL3; (+) strand; PAM type: YTN; PAM sequence: TTT
  source 1..20: mol_type = other DNA
ttatattggttcctaggaac

SEQ ID NO: 13993 - DNA, 20 bp, synthetic construct
  misc_feature 1..20: note = Description of Artificial Sequence: Synthetic oligonucleotide
  misc_feature 1..20: note = Target: ANGPTL3; (+) strand; PAM type: YTN; PAM sequence: TTT
  source 1..20: mol_type = other DNA
tatattggttcctaggaact

SEQ ID NO: 13994 - DNA, 20 bp, synthetic construct
  misc_feature 1..20: note = Description of Artificial Sequence: Synthetic oligonucleotide
  misc_feature 1..20: note = Target: ANGPTL3; (+) strand; PAM type: YTN; PAM sequence: TTT
  source 1..20: mol_type = other DNA
atattggttcctaggaacta

SEQ ID NO: 13995 - DNA, 20 bp, synthetic construct
  misc_feature 1..20: note = Description of Artificial Sequence: Synthetic oligonucleotide
  misc_feature 1..20: note = Target: ANGPTL3; (+) strand; PAM type: YTN; PAM sequence: TTA
  source 1..20: mol_type = other DNA
tattggttcctaggaactag

SEQ ID NO: 13996 - DNA, 20 bp, synthetic construct
  misc_feature 1..20: note = Description of Artificial Sequence: Synthetic oligonucleotide
  misc_feature 1..20: note = Target: ANGPTL3; (+) strand; PAM type: YTN; PAM sequence: TTG
  source 1..20: mol_type = other DNA
gttcctaggaactaggaatc

SEQ ID NO: 13997 - DNA, 20 bp, synthetic construct
  misc_feature 1..20: note = Description of Artificial Sequence: Synthetic oligonucleotide
  misc_feature 1..20: note = Target: ANGPTL3; (+) strand; PAM type: YTN; PAM sequence: TTC
  source 1..20: mol_type = other DNA
ctaggaactaggaatcctta

SEQ ID NO: 13998 - DNA, 20 bp, synthetic construct
  misc_feature 1..20: note = Description of Artificial Sequence: Synthetic oligonucleotide
  misc_feature 1..20: note = Target: ANGPTL3; (+) strand; PAM type: YTN; PAM sequence: CTA
  source 1..20: mol_type = other DNA
ggaactaggaatccttaaat

SEQ ID NO: 13999 - DNA, 20 bp, synthetic construct
  misc_feature 1..20: note = Description of Artificial Sequence: Synthetic oligonucleotide
  misc_feature 1..20: note = Target: ANGPTL3; (+) strand; PAM type: YTN; PAM sequence: CTA
  source 1..20: mol_type = other DNA
ggaatccttaaattaggccc

SEQ ID NO: 14000 - DNA, 20 bp, synthetic construct
  misc_feature 1..20: note = Description of Artificial Sequence: Synthetic oligonucleotide
  misc_feature 1..20: note = Target: ANGPTL3; (+) strand; PAM type: YTN; PAM sequence: CTT
  source 1..20: mol_type = other DNA
aaattaggccctacatttgc

SEQ ID NO: 14001 - DNA, 20 bp, synthetic construct
  misc_feature 1..20: note = Description of Artificial Sequence: Synthetic oligonucleotide
  misc_feature 1..20: note = Target: ANGPTL3; (+) strand; PAM type: YTN; PAM sequence: TTA
  source 1..20: mol_type = other DNA
aattaggccctacatttgct

SEQ ID NO: 14002 - DNA, 20 bp, synthetic construct
  misc_feature 1..20: note = Description of Artificial Sequence: Synthetic oligonucleotide
  misc_feature 1..20: note = Target: ANGPTL3; (+) strand; PAM type: YTN; PAM sequence: TTA
  source 1..20: mol_type = other DNA
ggccctacatttgcttacaa

SEQ ID NO: 14003 - DNA, 20 bp, synthetic construct
  misc_feature 1..20: note = Description of Artificial Sequence: Synthetic oligonucleotide
  misc_feature 1..20: note = Target: ANGPTL3; (+) strand; PAM type: YTN; PAM sequence: CTA
  source 1..20: mol_type = other DNA
catttgcttacaagtttatt

SEQ ID NO: 14004 - DNA, 20 bp, synthetic construct
  misc_feature 1..20: note = Description of Artificial Sequence: Synthetic oligonucleotide
  misc_feature 1..20: note = Target: ANGPTL3; (+) strand; PAM type: YTN; PAM sequence: TTT
  source 1..20: mol_type = other DNA
gcttacaagtttattttcct

SEQ ID NO: 14005 - DNA, 20 bp, synthetic construct
  misc_feature 1..20: note = Description of Artificial Sequence: Synthetic oligonucleotide
  misc_feature 1..20: note = Target: ANGPTL3; (+) strand; PAM type: YTN; PAM sequence: TTG
  source 1..20: mol_type = other DNA
cttacaagtttattttcctt

SEQ ID NO: 14006 - DNA, 20 bp, synthetic construct
  misc_feature 1..20: note = Description of Artificial Sequence: Synthetic oligonucleotide
  misc_feature 1..20: note = Target: ANGPTL3; (+) strand; PAM type: YTN; PAM sequence: CTT
  source 1..20: mol_type = other DNA
acaagtttattttccttggc

SEQ ID NO: 14007 - DNA, 20 bp, synthetic construct
  misc_feature 1..20: note = Description of Artificial Sequence: Synthetic oligonucleotide
  misc_feature 1..20: note = Target: ANGPTL3; (+) strand; PAM type: YTN; PAM sequence: TTA
  source 1..20: mol_type = other DNA
caagtttattttccttggca

SEQ ID NO: 14008 - DNA, 20 bp, synthetic construct
  misc_feature 1..20: note = Description of Artificial Sequence: Synthetic oligonucleotide
  misc_feature 1..20: note = Target: ANGPTL3; (+) strand; PAM type: YTN; PAM sequence: TTT
  source 1..20: mol_type = other DNA
attttccttggcataaaatt

SEQ ID NO: 14009 - DNA, 20 bp, synthetic construct
  misc_feature 1..20: note = Description of Artificial Sequence: Synthetic oligonucleotide
  misc_feature 1..20: note = Target: ANGPTL3; (+) strand; PAM type: YTN; PAM sequence: TTA
  source 1..20: mol_type = other DNA
ttttccttggcataaaattt

SEQ ID NO: 14010 - DNA, 20 bp, synthetic construct
  misc_feature 1..20: note = Description of Artificial Sequence: Synthetic oligonucleotide
  misc_feature 1..20: note = Target: ANGPTL3; (+) strand; PAM type: YTN; PAM sequence: TTT
  source 1..20: mol_type = other DNA
tccttggcataaaatttttt

SEQ ID NO: 14011 - DNA, 20 bp, synthetic construct
  misc_feature 1..20: note = Description of Artificial Sequence: Synthetic oligonucleotide
  misc_feature 1..20: note = Target: ANGPTL3; (+) strand; PAM type: YTN; PAM sequence: TTT
  source 1..20: mol_type = other DNA
ccttggcataaaatttttta

SEQ ID NO: 14012 - DNA, 20 bp, synthetic construct
  misc_feature 1..20: note = Description of Artificial Sequence: Synthetic oligonucleotide
  misc_feature 1..20: note = Target: ANGPTL3; (+) strand; PAM type: YTN; PAM sequence: TTC
  source 1..20: mol_type = other DNA
cttggcataaaattttttag

SEQ ID NO: 14013 - DNA, 20 bp, synthetic construct
  misc_feature 1..20: note = Description of Artificial Sequence: Synthetic oligonucleotide
  misc_feature 1..20: note = Target: ANGPTL3; (+) strand; PAM type: YTN; PAM sequence: CTT
  source 1..20: mol_type = other DNA
ggcataaaattttttagttt

SEQ ID NO: 14014 - DNA, 20 bp, synthetic construct
  misc_feature 1..20: note = Description of Artificial Sequence: Synthetic oligonucleotide
  misc_feature 1..20: note = Target: ANGPTL3; (+) strand; PAM type: YTN; PAM sequence: TTG
  source 1..20: mol_type = other DNA
gcataaaattttttagtttt

SEQ ID NO: 14015 - DNA, 20 bp, synthetic construct
  misc_feature 1..20: note = Description of Artificial Sequence: Synthetic oligonucleotide
  misc_feature 1..20: note = Target: ANGPTL3; (+) strand; PAM type: YTN; PAM sequence: TTT
  source 1..20: mol_type = other DNA
tttagtttttacattactgg

SEQ ID NO: 14016 - DNA, 20 bp, synthetic construct
  misc_feature 1..20: note = Description of Artificial Sequence: Synthetic oligonucleotide
  misc_feature 1..20: note = Target: ANGPTL3; (+) strand; PAM type: YTN; PAM sequence: TTT
  source 1..20: mol_type = other DNA
ttagtttttacattactggt

SEQ ID NO: 14017 - DNA, 20 bp, synthetic construct
  misc_feature 1..20: note = Description of Artificial Sequence: Synthetic oligonucleotide
  misc_feature 1..20: note = Target: ANGPTL3; (+) strand; PAM type: YTN; PAM sequence: TTT
  source 1..20: mol_type = other DNA
tagtttttacattactggtt

SEQ ID NO: 14018 - DNA, 20 bp, synthetic construct
  misc_feature 1..20: note = Description of Artificial Sequence: Synthetic oligonucleotide
  misc_feature 1..20: note = Target: ANGPTL3; (+) strand; PAM type: YTN; PAM sequence: TTT
  source 1..20: mol_type = other DNA
agtttttacattactggtta

SEQ ID NO: 14019 - DNA, 20 bp, synthetic construct
  misc_feature 1..20: note = Description of Artificial Sequence: Synthetic oligonucleotide
  misc_feature 1..20: note = Target: ANGPTL3; (+) strand; PAM type: YTN; PAM sequence: TTA
  source 1..20: mol_type = other DNA
gtttttacattactggttat

SEQ ID NO: 14020 - DNA, 20 bp, synthetic construct
  misc_feature 1..20: note = Description of Artificial Sequence: Synthetic oligonucleotide
  misc_feature 1..20: note = Target: ANGPTL3; (+) strand; PAM type: YTN; PAM sequence: TTT
  source 1..20: mol_type = other DNA
ttacattactggttatattt

SEQ ID NO: 14021 - DNA, 20 bp, synthetic construct
  misc_feature 1..20: note = Description of Artificial Sequence: Synthetic oligonucleotide
  misc_feature 1..20: note = Target: ANGPTL3; (+) strand; PAM type: YTN; PAM sequence: TTT
  source 1..20: mol_type = other DNA
tacattactggttatatttg

SEQ ID NO: 14022 - DNA, 20 bp, synthetic construct
  misc_feature 1..20: note = Description of Artificial Sequence: Synthetic oligonucleotide
  misc_feature 1..20: note = Target: ANGPTL3; (+) strand; PAM type: YTN; PAM sequence: TTT
  source 1..20: mol_type = other DNA
acattactggttatatttga

SEQ ID NO: 14023 - DNA, 20 bp, synthetic construct
  misc_feature 1..20: note = Description of Artificial Sequence: Synthetic oligonucleotide
  misc_feature 1..20: note = Target: ANGPTL3; (+) strand; PAM type: YTN; PAM sequence: TTA
  source 1..20: mol_type = other DNA
cattactggttatatttgat

SEQ ID NO: 14024 - DNA, 20 bp, synthetic construct
  misc_feature 1..20: note = Description of Artificial Sequence: Synthetic oligonucleotide
  misc_feature 1..20: note = Target: ANGPTL3; (+) strand; PAM type: YTN; PAM sequence: TTA
  source 1..20: mol_type = other DNA
ctggttatatttgatcaggg

SEQ ID NO: 14025 - DNA, 20 bp, synthetic construct
  misc_feature 1..20: note = Description of Artificial Sequence: Synthetic oligonucleotide
  misc_feature 1..20: note = Target: ANGPTL3; (+) strand; PAM type: YTN; PAM sequence: CTG
  source 1..20: mol_type = other DNA
gttatatttgatcagggttc

SEQ ID NO: 14026 - DNA, 20 bp, synthetic construct
  misc_feature 1..20: note = Description of Artificial Sequence: Synthetic oligonucleotide
  misc_feature 1..20: note = Target: ANGPTL3; (+) strand; PAM type: YTN; PAM sequence: TTA
  source 1..20: mol_type = other DNA
tatttgatcagggttctatt

SEQ ID NO: 14027 - DNA, 20 bp, synthetic construct
  misc_feature 1..20: note = Description of Artificial Sequence: Synthetic oligonucleotide
  misc_feature 1..20: note = Target: ANGPTL3; (+) strand; PAM type: YTN; PAM sequence: TTT
  source 1..20: mol_type = other DNA
gatcagggttctatttaaat

SEQ ID NO: 14028 - DNA, 20 bp, synthetic construct
  misc_feature 1..20: note = Description of Artificial Sequence: Synthetic oligonucleotide
  misc_feature 1..20: note = Target: ANGPTL3; (+) strand; PAM type: YTN; PAM sequence: TTG
  source 1..20: mol_type = other DNA
atcagggttctatttaaata

SEQ ID NO: 14029 - DNA, 20 bp, synthetic construct
  misc_feature 1..20: note = Description of Artificial Sequence: Synthetic oligonucleotide
  misc_feature 1..20: note = Target: ANGPTL3; (+) strand; PAM type: YTN; PAM sequence: TTC
  source 1..20: mol_type = other DNA
tatttaaataggcacaagtt

SEQ ID NO: 14030 - DNA, 20 bp, synthetic construct
  misc_feature 1..20: note = Description of Artificial Sequence: Synthetic oligonucleotide
  misc_feature 1..20: note = Target: ANGPTL3; (+) strand; PAM type: YTN; PAM sequence: CTA
  source 1..20: mol_type = other DNA
tttaaataggcacaagttca

SEQ ID NO: 14031 - DNA, 20 bp, synthetic construct
  misc_feature 1..20: note = Description of Artificial Sequence: Synthetic oligonucleotide
  misc_feature 1..20: note = Target: ANGPTL3; (+) strand; PAM type: YTN; PAM sequence: TTT
  source 1..20: mol_type = other DNA
aaataggcacaagttcaagc

SEQ ID NO: 14032 - DNA, 20 bp, synthetic construct
  misc_feature 1..20: note = Description of Artificial Sequence: Synthetic oligonucleotide
  misc_feature 1..20: note = Target: ANGPTL3; (+) strand; PAM type: YTN; PAM sequence: TTA
  source 1..20: mol_type = other DNA
aataggcacaagttcaagca

SEQ ID NO: 14033 - DNA, 20 bp, synthetic construct
  misc_feature 1..20: note = Description of Artificial Sequence: Synthetic oligonucleotide
  misc_feature 1..20: note = Target: ANGPTL3; (+) strand; PAM type: YTN; PAM sequence: TTC
  source 1..20: mol_type = other DNA
aagcaaagatcagattctgc

SEQ ID NO: 14034 - DNA, 20 bp, synthetic construct
  misc_feature 1..20: note = Description of Artificial Sequence: Synthetic oligonucleotide
  misc_feature 1..20: note = Target: ANGPTL3; (+) strand; PAM type: YTN; PAM sequence: TTC
  source 1..20: mol_type = other DNA
tgcttttagcagtgtgtact

SEQ ID NO: 14035 - DNA, 20 bp, synthetic construct
  misc_feature 1..20: note = Description of Artificial Sequence: Synthetic oligonucleotide
  misc_feature 1..20: note = Target: ANGPTL3; (+) strand; PAM type: YTN; PAM sequence: CTG
  source 1..20: mol_type = other DNA
cttttagcagtgtgtactca

SEQ ID NO: 14036 - DNA, 20 bp, synthetic construct
  misc_feature 1..20: note = Description of Artificial Sequence: Synthetic oligonucleotide
  misc_feature 1..20: note = Target: ANGPTL3; (+) strand; PAM type: YTN; PAM sequence: CTT
  source 1..20: mol_type = other DNA
ttagcagtgtgtactcagac

SEQ ID NO: 14037 - DNA, 20 bp, synthetic construct
  misc_feature 1..20: note = Description of Artificial Sequence: Synthetic oligonucleotide
  misc_feature 1..20: note = Target: ANGPTL3; (+) strand; PAM type: YTN; PAM sequence: TTT
  source 1..20: mol_type = other DNA
tagcagtgtgtactcagaca

SEQ ID NO: 14038 - DNA, 20 bp, synthetic construct
  misc_feature 1..20: note = Description of Artificial Sequence: Synthetic oligonucleotide
  misc_feature 1..20: note = Target: ANGPTL3; (+) strand; PAM type: YTN; PAM sequence: TTT
  source 1..20: mol_type = other DNA
agcagtgtgtactcagacag

SEQ ID NO: 14039 - DNA, 20 bp, synthetic construct
  misc_feature 1..20: note = Description of Artificial Sequence: Synthetic oligonucleotide
  misc_feature 1..20: note = Target: ANGPTL3; (+) strand; PAM type: YTN; PAM sequence: TTA
  source 1..20: mol_type = other DNA
gcagtgtgtactcagacagg

SEQ ID NO: 14040 - DNA, 20 bp, synthetic construct
  misc_feature 1..20: note = Description of Artificial Sequence: Synthetic oligonucleotide
  misc_feature 1..20: note = Target: ANGPTL3; (+) strand; PAM type: YTN; PAM sequence: CTC
  source 1..20: mol_type = other DNA
agacaggaagtattaaaagg

SEQ ID NO: 14041 - DNA, 20 bp, synthetic construct
  misc_feature 1..20: note = Description of Artificial Sequence: Synthetic oligonucleotide
  misc_feature 1..20: note = Target: ANGPTL3; (+) strand; PAM type: YTN; PAM sequence: TTA
  source 1..20: mol_type = other DNA
aaaggcaggcagaaaatcct

SEQ ID NO: 14042 - DNA, 20 bp, synthetic construct
  misc_feature 1..20: note = Description of Artificial Sequence: Synthetic oligonucleotide
  misc_feature 1..20: note = Target: ANGPTL3; (+) strand; PAM type: YTN; PAM sequence: CTT
  source 1..20: mol_type = other DNA
tataaaattactactttcaa

SEQ ID NO: 14043 - DNA, 20 bp, synthetic construct
  misc_feature 1..20: note = Description of Artificial Sequence: Synthetic oligonucleotide
  misc_feature 1..20: note = Target: ANGPTL3; (+) strand; PAM type: YTN; PAM sequence: TTT
  source 1..20: mol_type = other DNA
ataaaattactactttcaat

SEQ ID NO: 14044 - DNA, 20 bp, synthetic construct
  misc_feature 1..20: note = Description of Artificial Sequence: Synthetic oligonucleotide
  misc_feature 1..20: note = Target: ANGPTL3; (+) strand; PAM type: YTN; PAM sequence: TTA
  source 1..20: mol_type = other DNA
taaaattactactttcaatg

SEQ ID NO: 14045 - DNA, 20 bp, synthetic construct
  misc_feature 1..20: note = Description of Artificial Sequence: Synthetic oligonucleotide
  misc_feature 1..20: note = Target: ANGPTL3; (+) strand; PAM type: YTN; PAM sequence: TTA
  source 1..20: mol_type = other DNA
ctactttcaatgcattttcc

SEQ ID NO: 14046 - DNA, 20 bp, synthetic construct
  misc_feature 1..20: note = Description of Artificial Sequence: Synthetic oligonucleotide
  misc_feature 1..20: note = Target: ANGPTL3; (+) strand; PAM type: YTN; PAM sequence: CTA
  source 1..20: mol_type = other DNA
ctttcaatgcattttcccac

SEQ ID NO: 14047 - DNA, 20 bp, synthetic construct
  misc_feature 1..20: note = Description of Artificial Sequence: Synthetic oligonucleotide
  misc_feature 1..20: note = Target: ANGPTL3; (+) strand; PAM type: YTN; PAM sequence: CTT
  source 1..20: mol_type = other DNA
tcaatgcattttcccacgtt

SEQ ID NO: 14048 - DNA, 20 bp, synthetic construct
  misc_feature 1..20: note = Description of Artificial Sequence: Synthetic oligonucleotide
  misc_feature 1..20: note = Target: ANGPTL3; (+) strand; PAM type: YTN; PAM sequence: TTT
  source 1..20: mol_type = other DNA
caatgcattttcccacgttg

SEQ ID NO: 14049 - DNA, 20 bp, synthetic construct
  misc_feature 1..20: note = Description of Artificial Sequence: Synthetic oligonucleotide
  misc_feature 1..20: note = Target: ANGPTL3; (+) strand; PAM type: YTN; PAM sequence: TTC
  source 1..20: mol_type = other DNA
aatgcattttcccacgttga

SEQ ID NO: 14050 - DNA, 20 bp, synthetic construct
  misc_feature 1..20: note = Description of Artificial Sequence: Synthetic oligonucleotide
  misc_feature 1..20: note = Target: ANGPTL3; (+) strand; PAM type: YTN; PAM sequence: TTT
  source 1..20: mol_type = other DNA
tcccacgttgaaatgcttct

SEQ ID NO: 14051 - DNA, 20 bp, synthetic construct
  misc_feature 1..20: note = Description of Artificial Sequence: Synthetic oligonucleotide
  misc_feature 1..20: note = Target: ANGPTL3; (+) strand; PAM type: YTN; PAM sequence: TTT
  source 1..20: mol_type = other DNA
cccacgttgaaatgcttctg

SEQ ID NO: 14052 - DNA, 20 bp, synthetic construct
  misc_feature 1..20: note = Description of Artificial Sequence: Synthetic oligonucleotide
  misc_feature 1..20: note = Target: ANGPTL3; (+) strand; PAM type: YTN; PAM sequence: TTC
  source 1..20: mol_type = other DNA
ccacgttgaaatgcttctgc

SEQ ID NO: 14053 - DNA, 20 bp, synthetic construct
  misc_feature 1..20: note = Description of Artificial Sequence: Synthetic oligonucleotide
  misc_feature 1..20: note = Target: ANGPTL3; (+) strand; PAM type: YTN; PAM sequence: TTG
  source 1..20: mol_type = other DNA
aaatgcttctgcagtttata

SEQ ID NO: 14054 - DNA, 20 bp, synthetic construct
  misc_feature 1..20: note = Description of Artificial Sequence: Synthetic oligonucleotide
  misc_feature 1..20: note = Target: ANGPTL3; (+) strand; PAM type: YTN; PAM sequence: CTT
  source 1..20: mol_type = other DNA
ctgcagtttataattaggca

SEQ ID NO: 14055 - DNA, 20 bp, synthetic construct
  misc_feature 1..20: note = Description of Artificial Sequence: Synthetic oligonucleotide
  misc_feature 1..20: note = Target: ANGPTL3; (+) strand; PAM type: YTN; PAM sequence: TTC
  source 1..20: mol_type = other DNA
tgcagtttataattaggcaa

SEQ ID NO: 14056 - DNA, 20 bp, synthetic construct
  misc_feature 1..20: note = Description of Artificial Sequence: Synthetic oligonucleotide
  misc_feature 1..20: note = Target: ANGPTL3; (+) strand; PAM type: YTN; PAM sequence: CTG
  source 1..20: mol_type = other DNA
cagtttataattaggcaaat

SEQ ID NO: 14057 - DNA, 20 bp, synthetic construct
  misc_feature 1..20: note = Description of Artificial Sequence: Synthetic oligonucleotide
  misc_feature 1..20: note = Target: ANGPTL3; (+) strand; PAM type: YTN; PAM sequence: TTT
  source 1..20: mol_type = other DNA
ataattaggcaaattacttt

SEQ ID NO: 14058 - DNA, 20 bp, synthetic construct
  misc_feature 1..20: note = Description of Artificial Sequence: Synthetic oligonucleotide
  misc_feature 1..20: note = Target: ANGPTL3; (+) strand; PAM type: YTN; PAM sequence: TTA
  source 1..20: mol_type = other DNA
taattaggcaaattacttta

SEQ ID NO: 14059 - DNA, 20 bp, synthetic construct
  misc_feature 1..20: note = Description of Artificial Sequence: Synthetic oligonucleotide
  misc_feature 1..20: note = Target: ANGPTL3; (+) strand; PAM type: YTN; PAM sequence: TTA
  source 1..20: mol_type = other DNA
ggcaaattactttaattata

SEQ ID NO: 14060 - DNA, 20 bp, synthetic construct
  misc_feature 1..20: note = Description of Artificial Sequence: Synthetic oligonucleotide
  misc_feature 1..20: note = Target: ANGPTL3; (+) strand; PAM type: YTN; PAM sequence: TTA
  source 1..20: mol_type = other DNA
ctttaattataatcaataat

SEQ ID NO: 14061 - DNA, 20 bp, synthetic construct
  misc_feature 1..20: note = Description of Artificial Sequence: Synthetic oligonucleotide
  misc_feature 1..20: note = Target: ANGPTL3; (+) strand; PAM type: YTN; PAM sequence: CTT
  source 1..20: mol_type = other DNA
taattataatcaataatgct

SEQ ID NO: 14062 - DNA, 20 bp, synthetic construct
  misc_feature 1..20: note = Description of Artificial Sequence: Synthetic oligonucleotide
  misc_feature 1..20: note = Target: ANGPTL3; (+) strand; PAM type: YTN; PAM sequence: TTT
  source 1..20: mol_type = other DNA
aattataatcaataatgctg

SEQ ID NO: 14063 - DNA, 20 bp, synthetic construct
  misc_feature 1..20: note = Description of Artificial Sequence: Synthetic oligonucleotide
  misc_feature 1..20: note = Target: ANGPTL3; (+) strand; PAM type: YTN; PAM sequence: TTA
  source 1..20: mol_type = other DNA
attataatcaataatgctgt

SEQ ID NO: 14064 - DNA, 20 bp, synthetic construct
  misc_feature 1..20: note = Description of Artificial Sequence: Synthetic oligonucleotide
  misc_feature 1..20: note = Target: ANGPTL3; (+) strand; PAM type: YTN; PAM sequence: TTA
  source 1..20: mol_type = other DNA
taatcaataatgctgttcaa

SEQ ID NO: 14065 - DNA, 20 bp, synthetic construct
  misc_feature 1..20: note = Description of Artificial Sequence: Synthetic oligonucleotide
  misc_feature 1..20: note = Target: ANGPTL3; (+) strand; PAM type: YTN; PAM sequence: CTG
  source 1..20: mol_type = other DNA
ttcaaattactataagaatt

SEQ ID NO: 14066 - DNA, 20 bp, synthetic construct
  misc_feature 1..20: note = Description of Artificial Sequence: Synthetic oligonucleotide
  misc_feature 1..20: note = Target: ANGPTL3; (+) strand; PAM type: YTN; PAM sequence: TTC
  source 1..20: mol_type = other DNA
aaattactataagaattata

SEQ ID NO: 14067 - DNA, 20 bp, synthetic construct
  misc_feature 1..20: note = Description of Artificial Sequence: Synthetic oligonucleotide
  misc_feature 1..20: note = Target: ANGPTL3; (+) strand; PAM type: YTN; PAM sequence: TTA
  source 1..20: mol_type = other DNA
ctataagaattatacagata

SEQ ID NO: 14068 - DNA, 20 bp, synthetic construct
  misc_feature 1..20: note = Description of Artificial Sequence: Synthetic oligonucleotide
  misc_feature 1..20: note = Target: ANGPTL3; (+) strand; PAM type: YTN; PAM sequence: CTA
  source 1..20: mol_type = other DNA
taagaattatacagatattt

SEQ ID NO: 14069 - DNA, 20 bp, synthetic construct
  misc_feature 1..20: note = Description of Artificial Sequence: Synthetic oligonucleotide
  misc_feature 1..20: note = Target: ANGPTL3; (+) strand; PAM type: YTN; PAM sequence: TTA
  source 1..20: mol_type = other DNA
tacagatatttataccaaga

SEQ ID NO: 14070 - DNA, 20 bp, synthetic construct
  misc_feature 1..20: note = Description of Artificial Sequence: Synthetic oligonucleotide
  misc_feature 1..20: note = Target: ANGPTL3; (+) strand; PAM type: YTN; PAM sequence: TTT
  source 1..20: mol_type = other DNA
ataccaagagacaatatact

SEQ ID NO: 14071 - DNA, 20 bp, synthetic construct
  misc_feature 1..20: note = Description of Artificial Sequence: Synthetic oligonucleotide
  misc_feature 1..20: note = Target: ANGPTL3; (+) strand; PAM type: YTN; PAM sequence: TTA
  source 1..20: mol_type = other DNA
taccaagagacaatatacta

SEQ ID NO: 14072 - DNA, 20 bp, synthetic construct
  misc_feature 1..20: note = Description of Artificial Sequence: Synthetic oligonucleotide
  misc_feature 1..20: note = Target: ANGPTL3; (+) strand; PAM type: YTN; PAM sequence: CTA
  source 1..20: mol_type = other DNA
gaaaccaagactacgtgacc

SEQ ID NO: 14073 - DNA, 20 bp, synthetic construct
  misc_feature 1..20: note = Description of Artificial Sequence: Synthetic oligonucleotide
  misc_feature 1..20: note = Target: ANGPTL3; (+) strand; PAM type: YTN; PAM sequence: CTA
  source 1..20: mol_type = other DNA
cgtgaccattacctctactc

SEQ ID NO: 14074 - DNA, 20 bp, synthetic construct
  misc_feature 1..20: note = Description of Artificial Sequence: Synthetic oligonucleotide
  misc_feature 1..20: note = Target: ANGPTL3; (+) strand; PAM type: YTN; PAM sequence: TTA
  source 1..20: mol_type = other DNA
cctctactctgtcagtgtta

SEQ ID NO: 14075 - DNA, 20 bp, synthetic construct
  misc_feature 1..20: note = Description of Artificial Sequence: Synthetic oligonucleotide
  misc_feature 1..20: note = Target: ANGPTL3; (+) strand; PAM type: YTN; PAM sequence: CTC
  source 1..20: mol_type = other DNA
tactctgtcagtgttatttg

SEQ ID NO: 14076 - DNA, 20 bp, synthetic construct
  misc_feature 1..20: note = Description of Artificial Sequence: Synthetic oligonucleotide
  misc_feature 1..20: note = Target: ANGPTL3; (+) strand; PAM type: YTN; PAM sequence: CTA
  source 1..20: mol_type = other DNA
ctctgtcagtgttatttgtg

SEQ ID NO: 14077 - DNA, 20 bp, synthetic construct
  misc_feature 1..20: note = Description of Artificial Sequence: Synthetic oligonucleotide
  misc_feature 1..20: note = Target: ANGPTL3; (+) strand; PAM type: YTN; PAM sequence: CTC
  source 1..20: mol_type = other DNA
tgtcagtgttatttgtgaga

SEQ ID NO: 14078 - DNA, 20 bp, synthetic construct
  misc_feature 1..20: note = Description of Artificial Sequence: Synthetic oligonucleotide
  misc_feature 1..20: note = Target: ANGPTL3; (+) strand; PAM type: YTN; PAM sequence: CTG
  source 1..20: mol_type = other DNA
tcagtgttatttgtgagaaa

SEQ ID NO: 14079 - DNA, 20 bp, synthetic construct
  misc_feature 1..20: note = Description of Artificial Sequence: Synthetic oligonucleotide
  misc_feature 1..20: note = Target: ANGPTL3; (+) strand; PAM type: YTN; PAM sequence: TTA
  source 1..20: mol_type = other DNA
tttgtgagaaattgcacaaa

SEQ ID NO: 14080 - DNA, 20 bp, synthetic construct
  misc_feature 1..20: note = Description of Artificial Sequence: Synthetic oligonucleotide
  misc_feature 1..20: note = Target: ANGPTL3; (+) strand; PAM type: YTN; PAM sequence: TTT
  source 1..20: mol_type = other DNA
gtgagaaattgcacaaattt

SEQ ID NO: 14081 - DNA, 20 bp, synthetic construct
  misc_feature 1..20: note = Description of Artificial Sequence: Synthetic oligonucleotide
  misc_feature 1..20: note = Target: ANGPTL3; (+) strand; PAM type: YTN; PAM sequence: TTG
  source 1..20: mol_type = other DNA
tgagaaattgcacaaatttt

SEQ ID NO: 14082 - DNA, 20 bp, synthetic construct
  misc_feature 1..20: note = Description of Artificial Sequence: Synthetic oligonucleotide
  misc_feature 1..20: note = Target: ANGPTL3; (+) strand; PAM type: YTN; PAM sequence: TTG
  source 1..20: mol_type = other DNA
cacaaattttgcaaaaagtg

SEQ ID NO: 14083 - DNA, 20 bp, synthetic construct
  misc_feature 1..20: note = Description of Artificial Sequence: Synthetic oligonucleotide
  misc_feature 1..20: note = Target: ANGPTL3; (+) strand; PAM type: YTN; PAM sequence: TTT
  source 1..20: mol_type = other DNA
tgcaaaaagtgttagtatcc

SEQ ID NO: 14084 - DNA, 20 bp, synthetic construct
  misc_feature 1..20: note = Description of Artificial Sequence: Synthetic oligonucleotide
  misc_feature 1..20: note = Target: ANGPTL3; (+) strand; PAM type: YTN; PAM sequence: TTT
  source 1..20: mol_type = other DNA
gcaaaaagtgttagtatcct

SEQ ID NO: 14085 - DNA, 20 bp, synthetic construct
  misc_feature 1..20: note = Description of Artificial Sequence: Synthetic oligonucleotide
  misc_feature 1..20: note = Target: ANGPTL3; (+) strand; PAM type: YTN; PAM sequence: TTG
  source 1..20: mol_type = other DNA
caaaaagtgttagtatccta

SEQ ID NO: 14086 - DNA, 20 bp, synthetic construct
  misc_feature 1..20: note = Description of Artificial Sequence: Synthetic oligonucleotide
  misc_feature 1..20: note = Target: ANGPTL3; (+) strand; PAM type: YTN; PAM sequence: TTA
  source 1..20: mol_type = other DNA
gtatcctactacagtaggat

SEQ ID NO: 14087 - DNA, 20 bp, synthetic construct
  misc_feature 1..20: note = Description of Artificial Sequence: Synthetic oligonucleotide
  misc_feature 1..20: note = Target: ANGPTL3; (+) strand; PAM type: YTN; PAM sequence: CTA
  source 1..20: mol_type = other DNA
ctacagtaggatataatata

SEQ ID NO: 14088 - DNA, 20 bp, synthetic construct
  misc_feature 1..20: note = Description of Artificial Sequence: Synthetic oligonucleotide
  misc_feature 1..20: note = Target: ANGPTL3; (+) strand; PAM type: YTN; PAM sequence: CTA
  source 1..20: mol_type = other DNA
cagtaggatataatatagaa

SEQ ID NO: 14089 - DNA, 20 bp, synthetic construct
  misc_feature 1..20: note = Description of Artificial Sequence: Synthetic oligonucleotide
  misc_feature 1..20: note = Target: ANGPTL3; (+) strand; PAM type: YTN; PAM sequence: TTT
  source 1..20: mol_type = other DNA
cataaagcctgtctttggta

SEQ ID NO: 14090 - DNA, 20 bp, synthetic construct
  misc_feature 1..20: note = Description of Artificial Sequence: Synthetic oligonucleotide
  misc_feature 1..20: note = Target: ANGPTL3; (+) strand; PAM type: YTN; PAM sequence: TTC
  source 1..20: mol_type = other DNA
ataaagcctgtctttggtac

SEQ ID NO: 14091 - DNA, 20 bp, synthetic construct
  misc_feature 1..20: note = Description of Artificial Sequence: Synthetic oligonucleotide
  misc_feature 1..20: note = Target: ANGPTL3; (+) strand; PAM type: YTN; PAM sequence: CTG
  source 1..20: mol_type = other DNA
tctttggtactagtgctcag

SEQ ID NO: 14092 - DNA, 20 bp, synthetic construct
  misc_feature 1..20: note = Description of Artificial Sequence: Synthetic oligonucleotide
  misc_feature 1..20: note = Target: ANGPTL3; (+) strand; PAM type: YTN; PAM sequence: CTT
  source 1..20: mol_type = other DNA
tggtactagtgctcagttac

SEQ ID NO: 14093 - DNA, 20 bp, synthetic construct
  misc_feature 1..20: note = Description of Artificial Sequence: Synthetic oligonucleotide
  misc_feature 1..20: note = Target: ANGPTL3; (+) strand; PAM type: YTN; PAM sequence: TTT
  source 1..20: mol_type = other DNA
ggtactagtgctcagttact

SEQ ID NO: 14094 - DNA, 20 bp, synthetic construct
  misc_feature 1..20: note = Description of Artificial Sequence: Synthetic oligonucleotide
  misc_feature 1..20: note = Target: ANGPTL3; (+) strand; PAM type: YTN; PAM sequence: TTG
  source 1..20: mol_type = other DNA
gtactagtgctcagttactt

SEQ ID NO: 14095 - DNA, 20 bp, synthetic construct
  misc_feature 1..20: note = Description of Artificial Sequence: Synthetic oligonucleotide
  misc_feature 1..20: note = Target: ANGPTL3; (+) strand; PAM type: YTN; PAM sequence: CTA
  source 1..20: mol_type = other DNA
gtgctcagttactttcatta

SEQ ID NO: 14096 - DNA, 20 bp, synthetic construct
  misc_feature 1..20: note = Description of Artificial Sequence: Synthetic oligonucleotide
  misc_feature 1..20: note = Target: ANGPTL3; (+) strand; PAM type: YTN; PAM sequence: CTC
  source 1..20: mol_type = other DNA
agttactttcattaactaaa

SEQ ID NO: 14097 - DNA, 20 bp, synthetic construct
  misc_feature 1..20: note = Description of Artificial Sequence: Synthetic oligonucleotide
  misc_feature 1..20: note = Target: ANGPTL3; (+) strand; PAM type: YTN; PAM sequence: TTA
  source 1..20: mol_type = other DNA
ctttcattaactaaaaaagg

SEQ ID NO: 14098 - DNA, 20 bp, synthetic construct
  misc_feature 1..20: note = Description of Artificial Sequence: Synthetic oligonucleotide
  misc_feature 1..20: note = Target: ANGPTL3; (+) strand; PAM type: YTN; PAM sequence: CTT
  source 1..20: mol_type = other DNA
tcattaactaaaaaaggggc

SEQ ID NO: 14099 - DNA, 20 bp, synthetic construct
  misc_feature 1..20: note = Description of Artificial Sequence: Synthetic oligonucleotide
  misc_feature 1..20: note = Target: ANGPTL3; (+) strand; PAM type: YTN; PAM sequence: TTT
  source 1..20: mol_type = other DNA
cattaactaaaaaaggggct

SEQ ID NO: 14100 - DNA, 20 bp, synthetic construct
  misc_feature 1..20: note = Description of Artificial Sequence: Synthetic oligonucleotide
  misc_feature 1..20: note = Target: ANGPTL3; (+) strand; PAM type: YTN; PAM sequence: TTC
  source 1..20: mol_type = other DNA
attaactaaaaaaggggcta

SEQ ID NO: 14101 - DNA, 20 bp, synthetic construct
  misc_feature 1..20: note = Description of Artificial Sequence: Synthetic oligonucleotide
  misc_feature 1..20: note = Target: ANGPTL3; (+) strand; PAM type: YTN; PAM sequence: TTA
  source 1..20: mol_type = other DNA
actaaaaaaggggctactct

SEQ ID NO: 14102 - DNA, 20 bp, synthetic construct
  misc_feature 1..20: note = Description of Artificial Sequence: Synthetic oligonucleotide
  misc_feature 1..20: note = Target: ANGPTL3; (+) strand; PAM type: YTN; PAM sequence: CTA
  source 1..20: mol_type = other DNA
aaaaaggggctactcttcaa

SEQ ID NO: 14103 - DNA, 20 bp, synthetic construct
  misc_feature 1..20: note = Description of Artificial Sequence: Synthetic oligonucleotide
  misc_feature 1..20: note = Target: ANGPTL3; (+) strand; PAM type: YTN; PAM sequence: CTA
  source 1..20: mol_type = other DNA
ctcttcaaattcccttctct

SEQ ID NO: 14104 - DNA, 20 bp, synthetic construct
  misc_feature 1..20: note = Description of Artificial Sequence: Synthetic oligonucleotide
  misc_feature 1..20: note = Target: ANGPTL3; (+) strand; PAM type: YTN; PAM sequence: CTC
  source 1..20: mol_type = other DNA
ttcaaattcccttctctaaa

SEQ ID NO: 14105 - DNA, 20 bp, synthetic construct
  misc_feature 1..20: note = Description of Artificial Sequence: Synthetic oligonucleotide
  misc_feature 1..20: note = Target: ANGPTL3; (+) strand; PAM type: YTN; PAM sequence: CTT
  source 1..20: mol_type = other DNA
caaattcccttctctaaaaa

SEQ ID NO: 14106 - DNA, 20 bp, synthetic construct
  misc_feature 1..20: note = Description of Artificial Sequence: Synthetic oligonucleotide
  misc_feature 1..20: note = Target: ANGPTL3; (+) strand; PAM type: YTN; PAM sequence: TTC
  source 1..20: mol_type = other DNA
aaattcccttctctaaaaag

SEQ ID NO: 14107 - DNA, 20 bp, synthetic construct
  misc_feature 1..20: note = Description of Artificial Sequence: Synthetic oligonucleotide
  misc_feature 1..20: note = Target: ANGPTL3; (+) strand; PAM type: YTN; PAM sequence: TTC
  source 1..20: mol_type = other DNA
ccttctctaaaaagaatgta

SEQ ID NO: 14108 - DNA, 20 bp, synthetic construct
  misc_feature 1..20: note = Description of Artificial Sequence: Synthetic oligonucleotide
  misc_feature 1..20: note = Target: ANGPTL3; (+) strand; PAM type: YTN; PAM sequence: CTT
  source 1..20: mol_type = other DNA
ctctaaaaagaatgtactat

SEQ ID NO: 14109 - DNA, 20 bp, synthetic construct
  misc_feature 1..20: note = Description of Artificial Sequence: Synthetic oligonucleotide
  misc_feature 1..20: note = Target: ANGPTL3; (+) strand; PAM type: YTN; PAM sequence: TTC
  source 1..20: mol_type = other DNA
tctaaaaagaatgtactata

SEQ ID NO: 14110 - DNA, 20 bp, synthetic construct
  misc_feature 1..20: note = Description of Artificial Sequence: Synthetic oligonucleotide
  misc_feature 1..20: note = Target: ANGPTL3; (+) strand; PAM type: YTN; PAM sequence: CTC
  source 1..20: mol_type = other DNA
taaaaagaatgtactatatc

SEQ ID NO: 14111 - DNA, 20 bp, synthetic construct
  misc_feature 1..20: note = Description of Artificial Sequence: Synthetic oligonucleotide
  misc_feature 1..20: note = Target: ANGPTL3; (+) strand; PAM type: YTN; PAM sequence: CTA
  source 1..20: mol_type = other DNA
aaaagaatgtactatatcaa

SEQ ID NO: 14112 - DNA, 20 bp, synthetic construct
  misc_feature 1..20: note = Description of Artificial Sequence: Synthetic oligonucleotide
  misc_feature 1..20: note = Target: ANGPTL3; (+) strand; PAM type: YTN; PAM sequence: CTA
  source 1..20: mol_type = other DNA
tatcaaaagggggtaaacac

SEQ ID NO: 14113 - DNA, 20 bp, synthetic construct
  misc_feature 1..20: note = Description of Artificial Sequence: Synthetic oligonucleotide
  misc_feature 1..20: note = Target: ANGPTL3; (+) strand; PAM type: YTN; PAM sequence: CTA
  source 1..20: mol_type = other DNA
ctacgtatacattctgcact

SEQ ID NO: 14114 - DNA, 20 bp, synthetic construct
  misc_feature 1..20: note = Description of Artificial Sequence: Synthetic oligonucleotide
  misc_feature 1..20: note = Target: ANGPTL3; (+) strand; PAM type: YTN; PAM sequence: CTA
  source 1..20: mol_type = other DNA
cgtatacattctgcacttag

SEQ ID NO: 14115 - DNA, 20 bp, synthetic construct
  misc_feature 1..20: note = Description of Artificial Sequence: Synthetic oligonucleotide
  misc_feature 1..20: note = Target: ANGPTL3; (+) strand; PAM type: YTN; PAM sequence: TTC
  source 1..20: mol_type = other DNA
tgcacttagaaatccctata

SEQ ID NO: 14116 - DNA, 20 bp, synthetic construct
  misc_feature 1..20: note = Description of Artificial Sequence: Synthetic oligonucleotide
  misc_feature 1..20: note = Target: ANGPTL3; (+) strand; PAM type: YTN; PAM sequence: CTG
  source 1..20: mol_type = other DNA
cacttagaaatccctatatg

SEQ ID NO: 14117 - DNA, 20 bp, synthetic construct
  misc_feature 1..20: note = Description of Artificial Sequence: Synthetic oligonucleotide
  misc_feature 1..20: note = Target: ANGPTL3; (+) strand; PAM type: YTN; PAM sequence: CTT
  source 1..20: mol_type = other DNA
agaaatccctatatgttgat

SEQ ID NO: 14118 - DNA, 20 bp, synthetic construct
  misc_feature 1..20: note = Description of Artificial Sequence: Synthetic oligonucleotide
  misc_feature 1..20: note = Target: ANGPTL3; (+) strand; PAM type: YTN; PAM sequence: TTA
  source 1..20: mol_type = other DNA
gaaatccctatatgttgatt

SEQ ID NO: 14119 - DNA, 20 bp, synthetic construct
  misc_feature 1..20: note = Description of Artificial Sequence: Synthetic oligonucleotide
  misc_feature 1..20: note = Target: ANGPTL3; (+) strand; PAM type: YTN; PAM sequence: CTA
  source 1..20: mol_type = other DNA
tatgttgattttatcattct

SEQ ID NO: 14120 - DNA, 20 bp, synthetic construct
  misc_feature 1..20: note = Description of Artificial Sequence: Synthetic oligonucleotide
  misc_feature 1..20: note = Target: ANGPTL3; (+) strand; PAM type: YTN; PAM sequence: TTG
  source 1..20: mol_type = other DNA
attttatcattctcttattc

SEQ ID NO: 14121 - DNA, 20 bp, synthetic construct
  misc_feature 1..20: note = Description of Artificial Sequence: Synthetic oligonucleotide
  misc_feature 1..20: note = Target: ANGPTL3; (+) strand; PAM type: YTN; PAM sequence: TTT
  source 1..20: mol_type = other DNA
tatcattctcttattcaata

SEQ ID NO: 14122 - DNA, 20 bp, synthetic construct
  misc_feature 1..20: note = Description of Artificial Sequence: Synthetic oligonucleotide
  misc_feature 1..20: note = Target: ANGPTL3; (+) strand; PAM type: YTN; PAM sequence: TTT
  source 1..20: mol_type = other DNA
atcattctcttattcaataa

SEQ ID NO: 14123 - DNA, 20 bp, synthetic construct
  misc_feature 1..20: note = Description of Artificial Sequence: Synthetic oligonucleotide
  misc_feature 1..20: note = Target: ANGPTL3; (+) strand; PAM type: YTN; PAM sequence: TTA
  source 1..20: mol_type = other DNA
tcattctcttattcaataaa

SEQ ID NO: 14124 - DNA, 20 bp, synthetic construct
  misc_feature 1..20: note = Description of Artificial Sequence: Synthetic oligonucleotide
  misc_feature 1..20: note = Target: ANGPTL3; (+) strand; PAM type: YTN; PAM sequence: TTC
  source 1..20: mol_type = other DNA
tcttattcaataaatattgt

SEQ ID NO: 14125 - DNA, 20 bp, synthetic construct
  misc_feature 1..20: note = Description of Artificial Sequence: Synthetic oligonucleotide
  misc_feature 1..20: note = Target: ANGPTL3; (+) strand; PAM type: YTN; PAM sequence: CTC
  source 1..20: mol_type = other DNA
ttattcaataaatattgttt

SEQ ID NO: 14126 - DNA, 20 bp, synthetic construct
  misc_feature 1..20: note = Description of Artificial Sequence: Synthetic oligonucleotide
  misc_feature 1..20: note = Target: ANGPTL3; (+) strand; PAM type: YTN; PAM sequence: CTT
  source 1..20: mol_type = other DNA
attcaataaatattgtttct

SEQ ID NO: 14127 - DNA, 20 bp, synthetic construct
  misc_feature 1..20: note = Description of Artificial Sequence: Synthetic oligonucleotide
  misc_feature 1..20: note = Target: ANGPTL3; (+) strand; PAM type: YTN; PAM sequence: TTA
  source 1..20: mol_type = other DNA
ttcaataaatattgtttcta

SEQ ID NO: 14128 - DNA, 20 bp, synthetic construct
  misc_feature 1..20: note = Description of Artificial Sequence: Synthetic oligonucleotide
  misc_feature 1..20: note = Target: ANGPTL3; (+) strand; PAM type: YTN; PAM sequence: TTC
  source 1..20: mol_type = other DNA
aataaatattgtttctacaa

SEQ ID NO: 14129 - DNA, 20 bp, synthetic construct
  misc_feature 1..20: note = Description of Artificial Sequence: Synthetic oligonucleotide
  misc_feature 1..20: note = Target: ANGPTL3; (+) strand; PAM type: YTN; PAM sequence: TTG
  source 1..20: mol_type = other DNA
tttctacaatgtgtaaggca

SEQ ID NO: 14130 - DNA, 20 bp, synthetic construct
  misc_feature 1..20: note = Description of Artificial Sequence: Synthetic oligonucleotide
  misc_feature 1..20: note = Target: ANGPTL3; (+) strand; PAM type: YTN; PAM sequence: TTT
  source 1..20: mol_type = other DNA
ctacaatgtgtaaggcatta

SEQ ID NO: 14131 - DNA, 20 bp, synthetic construct
  misc_feature 1..20: note = Description of Artificial Sequence: Synthetic oligonucleotide
  misc_feature 1..20: note = Target: ANGPTL3; (+) strand; PAM type: YTN; PAM sequence: TTC
  source 1..20: mol_type = other DNA
tacaatgtgtaaggcattac

SEQ ID NO: 14132 - DNA, 20 bp, synthetic construct
  misc_feature 1..20: note = Description of Artificial Sequence: Synthetic oligonucleotide
  misc_feature 1..20: note = Target: ANGPTL3; (+) strand; PAM type: YTN; PAM sequence: CTA
  source 1..20: mol_type = other DNA
caatgtgtaaggcattactg

SEQ ID NO: 14133 - DNA, 20 bp, synthetic construct
  misc_feature 1..20: note = Description of Artificial Sequence: Synthetic oligonucleotide
  misc_feature 1..20: note = Target: ANGPTL3; (+) strand; PAM type: YTN; PAM sequence: TTA
  source 1..20: mol_type = other DNA
ctgtactaaagcattataag

SEQ ID NO: 14134 - DNA, 20 bp, synthetic construct
  misc_feature 1..20: note = Description of Artificial Sequence: Synthetic oligonucleotide
  misc_feature 1..20: note = Target: ANGPTL3; (+) strand; PAM type: YTN; PAM sequence: CTG
  source 1..20: mol_type = other DNA
tactaaagcattataaggaa

SEQ ID NO: 14135 - DNA, 20 bp, synthetic construct
  misc_feature 1..20: note = Description of Artificial Sequence: Synthetic oligonucleotide
  misc_feature 1..20: note = Target: ANGPTL3; (+) strand; PAM type: YTN; PAM sequence: CTA
  source 1..20: mol_type = other DNA
aagcattataaggaatataa

SEQ ID NO: 14136 - DNA, 20 bp, synthetic construct
  misc_feature 1..20: note = Description of Artificial Sequence: Synthetic oligonucleotide
  misc_feature 1..20: note = Target: ANGPTL3; (+) strand; PAM type: YTN; PAM sequence: TTA
  source 1..20: mol_type = other DNA
taaggaatataagttaaaaa

SEQ ID NO: 14137 - DNA, 20 bp, synthetic construct
  misc_feature 1..20: note = Description of Artificial Sequence: Synthetic oligonucleotide
  misc_feature 1..20: note = Target: ANGPTL3; (+) strand; PAM type: YTN; PAM sequence: TTA
  source 1..20: mol_type = other DNA
aaaacacatacaaatcttgc

SEQ ID NO: 14138 - DNA, 20 bp, synthetic construct
  misc_feature 1..20: note = Description of Artificial Sequence: Synthetic oligonucleotide
  misc_feature 1..20: note = Target: ANGPTL3; (+) strand; PAM type: YTN; PAM sequence: CTT
  source 1..20: mol_type = other DNA
gccaatcaacagcttatagt

SEQ ID NO: 14139 - DNA, 20 bp, synthetic construct
  misc_feature 1..20: note = Description of Artificial Sequence: Synthetic oligonucleotide
  misc_feature 1..20: note = Target: ANGPTL3; (+) strand; PAM type: YTN; PAM sequence: TTG
  source 1..20: mol_type = other DNA
ccaatcaacagcttatagtg

SEQ ID NO: 14140 - DNA, 20 bp, synthetic construct
  misc_feature 1..20: note = Description of Artificial Sequence: Synthetic oligonucleotide
  misc_feature 1..20: note = Target: ANGPTL3; (+) strand; PAM type: YTN; PAM sequence: CTT
  source 1..20: mol_type = other DNA
atagtgtaataggggagaga

SEQ ID NO: 14141 - DNA, 20 bp, synthetic construct
  misc_feature 1..20: note = Description of Artificial Sequence: Synthetic oligonucleotide
  misc_feature 1..20: note = Target: ANGPTL3; (+) strand; PAM type: YTN; PAM sequence: TTA
  source 1..20: mol_type = other DNA
tagtgtaataggggagagaa

SEQ ID NO: 14142 - DNA, 20 bp, synthetic construct
  misc_feature 1..20: note = Description of Artificial Sequence: Synthetic oligonucleotide
  misc_feature 1..20: note = Target: ANGPTL3; (+) strand; PAM type: YTN; PAM sequence: CTG
  source 1..20: mol_type = other DNA
gcccatctatattctccctc

SEQ ID NO: 14143 - DNA, 20 bp, synthetic construct
  misc_feature 1..20: note = Description of Artificial Sequence: Synthetic oligonucleotide
  misc_feature 1..20: note = Target: ANGPTL3; (+) strand; PAM type: YTN; PAM sequence: CTA
  source 1..20: mol_type = other DNA
tattctccctcaactagcaa

SEQ ID NO: 14144 - DNA, 20 bp, synthetic construct
  misc_feature 1..20: note = Description of Artificial Sequence: Synthetic oligonucleotide
  misc_feature 1..20: note = Target: ANGPTL3; (+) strand; PAM type: YTN; PAM sequence: TTC
  source 1..20: mol_type = other DNA
tccctcaactagcaagtgga

SEQ ID NO: 14145 - DNA, 20 bp, synthetic construct
  misc_feature 1..20: note = Description of Artificial Sequence: Synthetic oligonucleotide
  misc_feature 1..20: note = Target: ANGPTL3; (+) strand; PAM type: YTN; PAM sequence: CTC
  source 1..20: mol_type = other DNA
cctcaactagcaagtggatg

SEQ ID NO: 14146 - DNA, 20 bp, synthetic construct
  misc_feature 1..20: note = Description of Artificial Sequence: Synthetic oligonucleotide
  misc_feature 1..20: note = Target: ANGPTL3; (+) strand; PAM type: YTN; PAM sequence: CTC
  source 1..20: mol_type = other DNA
aactagcaagtggatgaaat

SEQ ID NO: 14147 - DNA, 20 bp, synthetic construct
  misc_feature 1..20: note = Description of Artificial Sequence: Synthetic oligonucleotide
  misc_feature 1..20: note = Target: ANGPTL3; (+) strand; PAM type: YTN; PAM sequence: CTA
  source 1..20: mol_type = other DNA
gcaagtggatgaaatatcag

SEQ ID NO: 14148 - DNA, 20 bp, synthetic construct
  misc_feature 1..20: note = Description of Artificial Sequence: Synthetic oligonucleotide
  misc_feature 1..20: note = Target: ANGPTL3; (+) strand; PAM type: YTN; PAM sequence: TTA
  source 1..20: mol_type = other DNA
taagccacaaaagctgacag

SEQ ID NO: 14149 - DNA, 20 bp, synthetic construct
  misc_feature 1..20: note = Description of Artificial Sequence: Synthetic oligonucleotide
  misc_feature 1..20: note = Target: ANGPTL3; (+) strand; PAM type: YTN; PAM sequence: CTG
  source 1..20: mol_type = other DNA
acagcttaattaagagaagt

SEQ ID NO: 14150 - DNA, 20 bp, synthetic construct
  misc_feature 1..20: note = Description of Artificial Sequence: Synthetic oligonucleotide
  misc_feature 1..20: note = Target: ANGPTL3; (+) strand; PAM type: YTN; PAM sequence: CTT
  source 1..20: mol_type = other DNA
aattaagagaagttttgaaa

SEQ ID NO: 14151 - DNA, 20 bp, synthetic construct
  misc_feature 1..20: note = Description of Artificial Sequence: Synthetic oligonucleotide
  misc_feature 1..20: note = Target: ANGPTL3; (+) strand; PAM type: YTN; PAM sequence: TTA
  source 1..20: mol_type = other DNA
attaagagaagttttgaaat

SEQ ID NO: 14152 - DNA, 20 bp, synthetic construct
  misc_feature 1..20: note = Description of Artificial Sequence: Synthetic oligonucleotide
  misc_feature 1..20: note = Target: ANGPTL3; (+) strand; PAM type: YTN; PAM sequence: TTA
  source 1..20: mol_type = other DNA
agagaagttttgaaatatgt

SEQ ID NO: 14153 - DNA, 20 bp, synthetic construct
  misc_feature 1..20: note = Description of Artificial Sequence: Synthetic oligonucleotide
  misc_feature 1..20: note = Target: ANGPTL3; (+) strand; PAM type: YTN; PAM sequence: TTT
  source 1..20: mol_type = other DNA
tgaaatatgtatttcatgac

SEQ ID NO: 14154 - DNA, 20 bp, synthetic construct
  misc_feature 1..20: note = Description of Artificial Sequence: Synthetic oligonucleotide
  misc_feature 1..20: note = Target: ANGPTL3; (+) strand; PAM type: YTN; PAM sequence: TTT
  source 1..20: mol_type = other DNA
gaaatatgtatttcatgacc

SEQ ID NO: 14155 - DNA, 20 bp, synthetic construct
  misc_feature 1..20: note = Description of Artificial Sequence: Synthetic oligonucleotide
  misc_feature 1..20: note = Target: ANGPTL3; (+) strand; PAM type: YTN; PAM sequence: TTG
  source 1..20: mol_type = other DNA
aaatatgtatttcatgacca

SEQ ID NO: 14156 - DNA, 20 bp, synthetic construct
  misc_feature 1..20: note = Description of Artificial Sequence: Synthetic oligonucleotide
  misc_feature 1..20: note = Target: ANGPTL3; (+) strand; PAM type: YTN; PAM sequence: TTT
  source 1..20: mol_type = other DNA
catgaccaataattacaact

SEQ ID NO: 14157 - DNA, 20 bp, synthetic construct
  misc_feature 1..20: note = Description of Artificial Sequence: Synthetic oligonucleotide
  misc_feature 1..20: note = Target: ANGPTL3; (+) strand; PAM type: YTN; PAM sequence: TTC
  source 1..20: mol_type = other DNA
atgaccaataattacaactg

SEQ ID NO: 14158 - DNA, 20 bp, synthetic construct
  misc_feature 1..20: note = Description of Artificial Sequence: Synthetic oligonucleotide
  misc_feature 1..20: note = Target: ANGPTL3; (+) strand; PAM type: YTN; PAM sequence: TTA
  source 1..20: mol_type = other DNA
caactgtaacttttctattt

SEQ ID NO: 14159 - DNA, 20 bp, synthetic construct
  misc_feature 1..20: note = Description of Artificial Sequence: Synthetic oligonucleotide
  misc_feature 1..20: note = Target: ANGPTL3; (+) strand; PAM type: YTN; PAM sequence: CTG
  source 1..20: mol_type = other DNA
taacttttctatttaaagaa

SEQ ID NO: 14160 - DNA, 20 bp, synthetic construct
  misc_feature 1..20: note = Description of Artificial Sequence: Synthetic oligonucleotide
  misc_feature 1..20: note = Target: ANGPTL3; (+) strand; PAM type: YTN; PAM sequence: CTT
  source 1..20: mol_type = other DNA
ttctatttaaagaaggagaa

SEQ ID NO: 14161 - DNA, 20 bp, synthetic construct
  misc_feature 1..20: note = Description of Artificial Sequence: Synthetic oligonucleotide
  misc_feature 1..20: note = Target: ANGPTL3; (+) strand; PAM type: YTN; PAM sequence: TTT
  source 1..20: mol_type = other DNA
tctatttaaagaaggagaaa

SEQ ID NO: 14162 - DNA, 20 bp, synthetic construct
  misc_feature 1..20: note = Description of Artificial Sequence: Synthetic oligonucleotide
  misc_feature 1..20: note = Target: ANGPTL3; (+) strand; PAM type: YTN; PAM sequence: TTT
  source 1..20: mol_type = other DNA
ctatttaaagaaggagaaaa

SEQ ID NO: 14163 - DNA, 20 bp, synthetic construct
  misc_feature 1..20: note = Description of Artificial Sequence: Synthetic oligonucleotide
  misc_feature 1..20: note = Target: ANGPTL3; (+) strand; PAM type: YTN; PAM sequence: TTC
  source 1..20: mol_type = other DNA
tatttaaagaaggagaaaat

SEQ ID NO: 14164 - DNA, 20 bp, synthetic construct
  misc_feature 1..20: note = Description of Artificial Sequence: Synthetic oligonucleotide
  misc_feature 1..20: note = Target: ANGPTL3; (+) strand; PAM type: YTN; PAM sequence: CTA
  source 1..20: mol_type = other DNA
tttaaagaaggagaaaattt

SEQ ID NO: 14165 - DNA, 20 bp, synthetic construct
  misc_feature 1..20: note = Description of Artificial Sequence: Synthetic oligonucleotide
  misc_feature 1..20: note = Target: ANGPTL3; (+) strand; PAM type: YTN; PAM sequence: TTT
  source 1..20: mol_type = other DNA
aaagaaggagaaaatttgaa

SEQ ID NO: 14166 - DNA, 20 bp, synthetic construct
  misc_feature 1..20: note = Description of Artificial Sequence: Synthetic oligonucleotide
  misc_feature 1..20: note = Target: ANGPTL3; (+) strand; PAM type: YTN; PAM sequence: TTA
  source 1..20: mol_type = other DNA
aagaaggagaaaatttgaat

SEQ ID NO: 14167 - DNA, 20 bp, synthetic construct
  misc_feature 1..20: note = Description of Artificial Sequence: Synthetic oligonucleotide
  misc_feature 1..20: note = Target: ANGPTL3; (+) strand; PAM type: YTN; PAM sequence: TTT
  source 1..20: mol_type = other DNA
gaatttcttctctagctcaa

SEQ ID NO: 14168 - DNA, 20 bp, synthetic construct
  misc_feature 1..20: note = Description of Artificial Sequence: Synthetic oligonucleotide
  misc_feature 1..20: note = Target: ANGPTL3; (+) strand; PAM type: YTN; PAM sequence: TTG
  source 1..20: mol_type = other DNA
aatttcttctctagctcaac

SEQ ID NO: 14169 - DNA, 20 bp, synthetic construct
  misc_feature 1..20: note = Description of Artificial Sequence: Synthetic oligonucleotide
  misc_feature 1..20: note = Target: ANGPTL3; (+) strand; PAM type: YTN; PAM sequence: TTT
  source 1..20: mol_type = other DNA
cttctctagctcaacataca

SEQ ID NO: 14170 - DNA, 20 bp, synthetic construct
  misc_feature 1..20: note = Description of Artificial Sequence: Synthetic oligonucleotide
  misc_feature 1..20: note = Target: ANGPTL3; (+) strand; PAM type: YTN; PAM sequence: TTC
  source 1..20: mol_type = other DNA
ttctctagctcaacatacac

SEQ ID NO: 14171 - DNA, 20 bp, synthetic construct
  misc_feature 1..20: note = Description of Artificial Sequence: Synthetic oligonucleotide
  misc_feature 1..20: note = Target: ANGPTL3; (+) strand; PAM type: YTN; PAM sequence: CTT
  source 1..20: mol_type = other DNA
ctctagctcaacatacactt

SEQ ID NO: 14172 - DNA, 20 bp, synthetic construct
  misc_feature 1..20: note = Description of Artificial Sequence: Synthetic oligonucleotide
  misc_feature 1..20: note = Target: ANGPTL3; (+) strand; PAM type: YTN; PAM sequence: TTC
  source 1..20: mol_type = other DNA
tctagctcaacatacacttc

SEQ ID NO: 14173 - DNA, 20 bp, synthetic construct
  misc_feature 1..20: note = Description of Artificial Sequence: Synthetic oligonucleotide
  misc_feature 1..20: note = Target: ANGPTL3; (+) strand; PAM type: YTN; PAM sequence: CTC
  source 1..20: mol_type = other DNA
tagctcaacatacacttcta

SEQ ID NO: 14174 - DNA, 20 bp, synthetic construct
  misc_feature 1..20: note = Description of Artificial Sequence: Synthetic oligonucleotide
  misc_feature 1..20: note = Target: ANGPTL3; (+) strand; PAM type: YTN; PAM sequence: CTA
  source 1..20: mol_type = other DNA
gctcaacatacacttctata

SEQ ID NO: 14175 - DNA, 20 bp, synthetic construct
  misc_feature 1..20: note = Description of Artificial Sequence: Synthetic oligonucleotide
  misc_feature 1..20: note = Target: ANGPTL3; (+) strand; PAM type: YTN; PAM sequence: CTC
  source 1..20: mol_type = other DNA
aacatacacttctataattc

SEQ ID NO: 14176 - DNA, 20 bp, synthetic construct
  misc_feature 1..20: note = Description of Artificial Sequence: Synthetic oligonucleotide
  misc_feature 1..20: note = Target: ANGPTL3; (+) strand; PAM type: YTN; PAM sequence: CTT
  source 1..20: mol_type = other DNA
ctataattccattacatgaa

SEQ ID NO: 14177 - DNA, 20 bp, synthetic construct
  misc_feature 1..20: note = Description of Artificial Sequence: Synthetic oligonucleotide
  misc_feature 1..20: note = Target: ANGPTL3; (+) strand; PAM type: YTN; PAM sequence: TTC
  source 1..20: mol_type = other DNA
tataattccattacatgaac

SEQ ID NO: 14178 - DNA, 20 bp, synthetic construct
  misc_feature 1..20: note = Description of Artificial Sequence: Synthetic oligonucleotide
  misc_feature 1..20: note = Target: ANGPTL3; (+) strand; PAM type: YTN; PAM sequence: CTA
  source 1..20: mol_type = other DNA
taattccattacatgaacca

SEQ ID NO: 14179 - DNA, 20 bp, synthetic construct
  misc_feature 1..20: note = Description of Artificial Sequence: Synthetic oligonucleotide
  misc_feature 1..20: note = Target: ANGPTL3; (+) strand; PAM type: YTN; PAM sequence: TTC
  source 1..20: mol_type = other DNA
cattacatgaaccagagtaa

SEQ ID NO: 14180 - DNA, 20 bp, synthetic construct
  misc_feature 1..20: note = Description of Artificial Sequence: Synthetic oligonucleotide
  misc_feature 1..20: note = Target: ANGPTL3; (+) strand; PAM type: YTN; PAM sequence: TTA
  source 1..20: mol_type = other DNA
catgaaccagagtaaagggt

SEQ ID NO: 14181 - DNA, 20 bp, synthetic construct
  misc_feature 1..20: note = Description of Artificial Sequence: Synthetic oligonucleotide
  misc_feature 1..20: note = Target: ANGPTL3; (+) strand; PAM type: YTN; PAM sequence: TTT
  source 1..20: mol_type = other DNA
tcttacccttttgtggttct

SEQ ID NO: 14182 - DNA, 20 bp, synthetic construct
  misc_feature 1..20: note = Description of Artificial Sequence: Synthetic oligonucleotide
  misc_feature 1..20: note = Target: ANGPTL3; (+) strand; PAM type: YTN; PAM sequence: TTT
  source 1..20: mol_type = other DNA
cttacccttttgtggttcta

SEQ ID NO: 14183 - DNA, 20 bp, synthetic construct
  misc_feature 1..20: note = Description of Artificial Sequence: Synthetic oligonucleotide
  misc_feature 1..20: note = Target: ANGPTL3; (+) strand; PAM type: YTN; PAM sequence: TTC
  source 1..20: mol_type = other DNA
ttacccttttgtggttctat

SEQ ID NO: 14184 - DNA, 20 bp, synthetic construct
  misc_feature 1..20: note = Description of Artificial Sequence: Synthetic oligonucleotide
  misc_feature 1..20: note = Target: ANGPTL3; (+) strand; PAM type: YTN; PAM sequence: CTT
  source 1..20: mol_type = other DNA
acccttttgtggttctatat

SEQ ID NO: 14185 - DNA, 20 bp, synthetic construct
  misc_feature 1..20: note = Description of Artificial Sequence: Synthetic oligonucleotide
  misc_feature 1..20: note = Target: ANGPTL3; (+) strand; PAM type: YTN; PAM sequence: TTA
  source 1..20: mol_type = other DNA
cccttttgtggttctatatt

SEQ ID NO: 14186 - DNA, 20 bp, synthetic construct
  misc_feature 1..20: note = Description of Artificial Sequence: Synthetic oligonucleotide
  misc_feature 1..20: note = Target: ANGPTL3; (+) strand; PAM type: YTN; PAM sequence: CTT
  source 1..20: mol_type = other DNA
ttgtggttctatattggaca

SEQ ID NO: 14187 - DNA, 20 bp, synthetic construct
  misc_feature 1..20: note = Description of Artificial Sequence: Synthetic oligonucleotide
  misc_feature 1..20: note = Target: ANGPTL3; (+) strand; PAM type: YTN; PAM sequence: TTT
  source 1..20: mol_type = other DNA
tgtggttctatattggacac

SEQ ID NO: 14188 - DNA, 20 bp, synthetic construct
  misc_feature 1..20: note = Description of Artificial Sequence: Synthetic oligonucleotide
  misc_feature 1..20: note = Target: ANGPTL3; (+) strand; PAM type: YTN; PAM sequence: TTT
  source 1..20: mol_type = other DNA
gtggttctatattggacact

SEQ ID NO: 14189 - DNA, 20 bp, synthetic construct
  misc_feature 1..20: note = Description of Artificial Sequence: Synthetic oligonucleotide
  misc_feature 1..20: note = Target: ANGPTL3; (+) strand; PAM type: YTN; PAM sequence: TTG
  source 1..20: mol_type = other DNA
tggttctatattggacactt

SEQ ID NO: 14190 - DNA, 20 bp, synthetic construct
  misc_feature 1..20: note = Description of Artificial Sequence: Synthetic oligonucleotide
  misc_feature 1..20: note = Target: ANGPTL3; (+) strand; PAM type: YTN; PAM sequence: TTC
  source 1..20: mol_type = other DNA
tatattggacacttaaaaat

SEQ ID NO: 14191 - DNA, 20 bp, synthetic construct
  misc_feature 1..20: note = Description of Artificial Sequence: Synthetic oligonucleotide
  misc_feature 1..20: note = Target: ANGPTL3; (+) strand; PAM type: YTN; PAM sequence: CTA
  source 1..20: mol_type = other DNA
tattggacacttaaaaatca

SEQ ID NO: 14192 - DNA, 20 bp, synthetic construct
  misc_feature 1..20: note = Description of Artificial Sequence: Synthetic oligonucleotide
  misc_feature 1..20: note = Target: ANGPTL3; (+) strand; PAM type: YTN; PAM sequence: TTG
  source 1..20: mol_type = other DNA
gacacttaaaaatcatacac

SEQ ID NO: 14193 - DNA, 20 bp, synthetic construct
  misc_feature 1..20: note = Description of Artificial Sequence: Synthetic oligonucleotide
  misc_feature 1..20: note = Target: ANGPTL3; (+) strand; PAM type: YTN; PAM sequence: CTT
  source 1..20: mol_type = other DNA
aaaaatcatacacaacctaa

SEQ ID NO: 14194 - DNA, 20 bp, synthetic construct
  misc_feature 1..20: note = Description of Artificial Sequence: Synthetic oligonucleotide
  misc_feature 1..20: note = Target: ANGPTL3; (+) strand; PAM type: YTN; PAM sequence: TTA
  source 1..20: mol_type = other DNA
aaaatcatacacaacctaat

SEQ ID NO: 14195 - DNA, 20 bp, synthetic construct
  misc_feature 1..20: note = Description of Artificial Sequence: Synthetic oligonucleotide
  misc_feature 1..20: note = Target: ANGPTL3; (+) strand; PAM type: YTN; PAM sequence: CTA
  source 1..20: mol_type = other DNA
atcaaaagatgtaattcttt

SEQ ID NO: 14196 - DNA, 20 bp, synthetic construct
  misc_feature 1..20: note = Description of Artificial Sequence: Synthetic oligonucleotide
  misc_feature 1..20: note = Target: ANGPTL3; (+) strand; PAM type: YTN; PAM sequence: TTC
  source 1..20: mol_type = other DNA
tttaaaaaggtacgagacca

SEQ ID NO: 14197 - DNA, 20 bp, synthetic construct
  misc_feature 1..20: note = Description of Artificial Sequence: Synthetic oligonucleotide
  misc_feature 1..20: note = Target: ANGPTL3; (+) strand; PAM type: YTN; PAM sequence: CTT
  source 1..20: mol_type = other DNA
taaaaaggtacgagaccaaa

SEQ ID NO: 14198 - DNA, 20 bp, synthetic construct
  misc_feature 1..20: note = Description of Artificial Sequence: Synthetic oligonucleotide
  misc_feature 1..20: note = Target: ANGPTL3; (+) strand; PAM type: YTN; PAM sequence: TTT
  source 1..20: mol_type = other DNA
aaaaaggtacgagaccaaaa

SEQ ID NO: 14199 - DNA, 20 bp, synthetic construct
  misc_feature 1..20: note = Description of Artificial Sequence: Synthetic oligonucleotide
  misc_feature 1..20: note = Target: ANGPTL3; (+) strand; PAM type: YTN; PAM sequence: TTA
  source 1..20: mol_type = other DNA
aaaaggtacgagaccaaaat

SEQ ID NO: 14200 - DNA, 20 bp, synthetic construct
  misc_feature 1..20: note = Description of Artificial Sequence: Synthetic oligonucleotide
  misc_feature 1..20: note = Target: ANGPTL3; (+) strand; PAM type: YTN; PAM sequence: TTC
  source 1..20: mol_type = other DNA
agaaaatctagactataaca

SEQ ID NO: 14201 - DNA, 20 bp, synthetic construct
  misc_feature 1..20: note = Description of Artificial Sequence: Synthetic oligonucleotide
  misc_feature 1..20: note = Target: ANGPTL3; (+) strand; PAM type: YTN; PAM sequence: CTA
  source 1..20: mol_type = other DNA
gactataacaaaatttctca

SEQ ID NO: 14202 - DNA, 20 bp, synthetic construct
  misc_feature 1..20: note = Description of Artificial Sequence: Synthetic oligonucleotide
  misc_feature 1..20: note = Target: ANGPTL3; (+) strand; PAM type: YTN; PAM sequence: CTA
  source 1..20: mol_type = other DNA
taacaaaatttctcaattta

SEQ ID NO: 14203 - DNA, 20 bp, synthetic construct
  misc_feature 1..20: note = Description of Artificial Sequence: Synthetic oligonucleotide
  misc_feature 1..20: note = Target: ANGPTL3; (+) strand; PAM type: YTN; PAM sequence: TTT
  source 1..20: mol_type = other DNA
ctcaatttacattatcttaa

SEQ ID NO: 14204 - DNA, 20 bp, synthetic construct
  misc_feature 1..20: note = Description of Artificial Sequence: Synthetic oligonucleotide
  misc_feature 1..20: note = Target: ANGPTL3; (+) strand; PAM type: YTN; PAM sequence: TTC
  source 1..20: mol_type = other DNA
tcaatttacattatcttaat

SEQ ID NO: 14205 - DNA, 20 bp, synthetic construct
  misc_feature 1..20: note = Description of Artificial Sequence: Synthetic oligonucleotide
  misc_feature 1..20: note = Target: ANGPTL3; (+) strand; PAM type: YTN; PAM sequence: CTC
  source 1..20: mol_type = other DNA
aatttacattatcttaatat

SEQ ID NO: 14206 - DNA, 20 bp, synthetic construct
  misc_feature 1..20: note = Description of Artificial Sequence: Synthetic oligonucleotide
  misc_feature 1..20: note = Target: ANGPTL3; (+) strand; PAM type: YTN; PAM sequence: TTT
  source 1..20: mol_type = other DNA
acattatcttaatatgcaat

SEQ ID NO: 14207 - DNA, 20 bp, synthetic construct
  misc_feature 1..20: note = Description of Artificial Sequence: Synthetic oligonucleotide
  misc_feature 1..20: note = Target: ANGPTL3; (+) strand; PAM type: YTN; PAM sequence: TTA
  source 1..20: mol_type = other DNA
cattatcttaatatgcaatt

SEQ ID NO: 14208 - DNA, 20 bp, synthetic construct
  misc_feature 1..20: note = Description of Artificial Sequence: Synthetic oligonucleotide
  misc_feature 1..20: note = Target: ANGPTL3; (+) strand; PAM type: YTN; PAM sequence: TTA
  source 1..20: mol_type = other DNA
tcttaatatgcaattaattt

SEQ ID NO: 14209 - DNA, 20 bp, synthetic construct
  misc_feature 1..20: note = Description of Artificial Sequence: Synthetic oligonucleotide
  misc_feature 1..20: note = Target: ANGPTL3; (+) strand; PAM type: YTN; PAM sequence: CTT
  source 1..20: mol_type = other DNA
aatatgcaattaattttcac

SEQ ID NO: 14210 - DNA, 20 bp, synthetic construct
  misc_feature 1..20: note = Description of Artificial Sequence: Synthetic oligonucleotide
  misc_feature 1..20: note = Target: ANGPTL3; (+) strand; PAM type: YTN; PAM sequence: TTA
  source 1..20: mol_type = other DNA
atatgcaattaattttcacc

SEQ ID NO: 14211 - DNA, 20 bp, synthetic construct
  misc_feature 1..20: note = Description of Artificial Sequence: Synthetic oligonucleotide
  misc_feature 1..20: note = Target: ANGPTL3; (+) strand; PAM type: YTN; PAM sequence: TTA
  source 1..20: mol_type = other DNA
attttcaccagtaaaatact

SEQ ID NO: 14212 - DNA, 20 bp, synthetic construct
  misc_feature 1..20: note = Description of Artificial Sequence: Synthetic oligonucleotide
  misc_feature 1..20: note = Target: ANGPTL3; (+) strand; PAM type: YTN; PAM sequence: TTT
  source 1..20: mol_type = other DNA
tcaccagtaaaatactatag

SEQ ID NO: 14213 - DNA, 20 bp, synthetic construct
  misc_feature 1..20: note = Description of Artificial Sequence: Synthetic oligonucleotide
  misc_feature 1..20: note = Target: ANGPTL3; (+) strand; PAM type: YTN; PAM sequence: TTT
  source 1..20: mol_type = other DNA
caccagtaaaatactatagt

SEQ ID NO: 14214 - DNA, 20 bp, synthetic construct
  misc_feature 1..20: note = Description of Artificial Sequence: Synthetic oligonucleotide
  misc_feature 1..20: note = Target: ANGPTL3; (+) strand; PAM type: YTN; PAM sequence: TTC
  source 1..20: mol_type = other DNA
accagtaaaatactatagta

SEQ ID NO: 14215 - DNA, 20 bp, synthetic construct
  misc_feature 1..20: note = Description of Artificial Sequence: Synthetic oligonucleotide
  misc_feature 1..20: note = Target: ANGPTL3; (+) strand; PAM type: YTN; PAM sequence: CTA
  source 1..20: mol_type = other DNA
tagtatgggtacaaatgcat

SEQ ID NO: 14216 - DNA, 20 bp, synthetic construct
  misc_feature 1..20: note = Description of Artificial Sequence: Synthetic oligonucleotide
  misc_feature 1..20: note = Target: ANGPTL3; (+) strand; PAM type: YTN; PAM sequence: TTG
  source 1..20: mol_type = other DNA
attagttctaattacaaaaa

SEQ ID NO: 14217 - DNA, 20 bp, synthetic construct
  misc_feature 1..20: note = Description of Artificial Sequence: Synthetic oligonucleotide
  misc_feature 1..20: note = Target: ANGPTL3; (+) strand; PAM type: YTN; PAM sequence: TTA
  source 1..20: mol_type = other DNA
gttctaattacaaaaatggc

SEQ ID NO: 14218 - DNA, 20 bp, synthetic construct
  misc_feature 1..20: note = Description of Artificial Sequence: Synthetic oligonucleotide
  misc_feature 1..20: note = Target: ANGPTL3; (+) strand; PAM type: YTN; PAM sequence: TTC
  source 1..20: mol_type = other DNA
taattacaaaaatggctaat

SEQ ID NO: 14219 - DNA, 20 bp, synthetic construct
  misc_feature 1..20: note = Description of Artificial Sequence: Synthetic oligonucleotide
  misc_feature 1..20: note = Target: ANGPTL3; (+) strand; PAM type: YTN; PAM sequence: CTA
  source 1..20: mol_type = other DNA
attacaaaaatggctaatat

SEQ ID NO: 14220 - DNA, 20 bp, synthetic construct
  misc_feature 1..20: note = Description of Artificial Sequence: Synthetic oligonucleotide
  misc_feature 1..20: note = Target: ANGPTL3; (+) strand; PAM type: YTN; PAM sequence: TTA
  source 1..20: mol_type = other DNA
caaaaatggctaatatataa

SEQ ID NO: 14221 - DNA, 20 bp, synthetic construct
  misc_feature 1..20: note = Description of Artificial Sequence: Synthetic oligonucleotide
  misc_feature 1..20: note = Target: ANGPTL3; (+) strand; PAM type: YTN; PAM sequence: CTA
  source 1..20: mol_type = other DNA
atatataatactgtgtagtg

SEQ ID NO: 14222 - DNA, 20 bp, synthetic construct
  misc_feature 1..20: note = Description of Artificial Sequence: Synthetic oligonucleotide
  misc_feature 1..20: note = Target: ANGPTL3; (+) strand; PAM type: YTN; PAM sequence: CTG
  source 1..20: mol_type = other DNA
tgtagtgtttatgatacatc

SEQ ID NO: 14223 - DNA, 20 bp, synthetic construct
  misc_feature 1..20: note = Description of Artificial Sequence: Synthetic oligonucleotide
  misc_feature 1..20: note = Target: ANGPTL3; (+) strand; PAM type: YTN; PAM sequence: TTT
  source 1..20: mol_type = other DNA
atgatacatcagataatgtt

SEQ ID NO: 14224 - DNA, 20 bp, synthetic construct
  misc_feature 1..20: note = Description of Artificial Sequence: Synthetic oligonucleotide
  misc_feature 1..20: note = Target: ANGPTL3; (+) strand; PAM type: YTN; PAM sequence: TTA
  source 1..20: mol_type = other DNA
tgatacatcagataatgttc

SEQ ID NO: 14225 - DNA, 20 bp, synthetic construct
  misc_feature 1..20: note = Description of Artificial Sequence: Synthetic oligonucleotide
  misc_feature 1..20: note = Target: ANGPTL3; (+) strand; PAM type: YTN; PAM sequence: TTC
  source 1..20: mol_type = other DNA
taagtgctctgaaaatataa

SEQ ID NO: 14226 - DNA, 20 bp, synthetic construct
  misc_feature 1..20: note = Description of Artificial Sequence: Synthetic oligonucleotide
  misc_feature 1..20: note = Target: ANGPTL3; (+) strand; PAM type: YTN; PAM sequence: CTA
  source 1..20: mol_type = other DNA
agtgctctgaaaatataaac

SEQ ID NO: 14227 - DNA, 20 bp, synthetic construct
  misc_feature 1..20: note = Description of Artificial Sequence: Synthetic oligonucleotide
  misc_feature 1..20: note = Target: ANGPTL3; (+) strand; PAM type: YTN; PAM sequence: CTC
  source 1..20: mol_type = other DNA
tgaaaatataaacttttaat

SEQ ID NO: 14228 - DNA, 20 bp, synthetic construct
  misc_feature 1..20: note = Description of Artificial Sequence: Synthetic oligonucleotide
  misc_feature 1..20: note = Target: ANGPTL3; (+) strand; PAM type: YTN; PAM sequence: CTG
  source 1..20: mol_type = other DNA
aaaatataaacttttaatct

SEQ ID NO: 14229 - DNA, 20 bp, synthetic construct
  misc_feature 1..20: note = Description of Artificial Sequence: Synthetic oligonucleotide
  misc_feature 1..20: note = Target: ANGPTL3; (+) strand; PAM type: YTN; PAM sequence: CTT
  source 1..20: mol_type = other DNA
ttaatcttttatacgaccct

SEQ ID NO: 14230 - DNA, 20 bp, synthetic construct
  misc_feature 1..20: note = Description of Artificial Sequence: Synthetic oligonucleotide
  misc_feature 1..20: note = Target: ANGPTL3; (+) strand; PAM type: YTN; PAM sequence: TTT
  source 1..20: mol_type = other DNA
taatcttttatacgacccta

SEQ ID NO: 14231 - DNA, 20 bp, synthetic construct
  misc_feature 1..20: note = Description of Artificial Sequence: Synthetic oligonucleotide
  misc_feature 1..20: note = Target: ANGPTL3; (+) strand; PAM type: YTN; PAM sequence: TTT
  source 1..20: mol_type = other DNA
aatcttttatacgaccctat

SEQ ID NO: 14232 - DNA, 20 bp, synthetic construct
  misc_feature 1..20: note = Description of Artificial Sequence: Synthetic oligonucleotide
  misc_feature 1..20: note = Target: ANGPTL3; (+) strand; PAM type: YTN; PAM sequence: TTA
  source 1..20: mol_type = other DNA
atcttttatacgaccctata

SEQ ID NO: 14233 - DNA, 20 bp, synthetic construct
  misc_feature 1..20: note = Description of Artificial Sequence: Synthetic oligonucleotide
  misc_feature 1..20: note = Target: ANGPTL3; (+) strand; PAM type: YTN; PAM sequence: CTT
  source 1..20: mol_type = other DNA
ttatacgaccctataaaata

SEQ ID NO: 14234 - DNA, 20 bp, synthetic construct
  misc_feature 1..20: note = Description of Artificial Sequence: Synthetic oligonucleotide
  misc_feature 1..20: note = Target: ANGPTL3; (+) strand; PAM type: YTN; PAM sequence: TTT
  source 1..20: mol_type = other DNA
tatacgaccctataaaatag

SEQ ID NO: 14235 - DNA, 20 bp, synthetic construct
  misc_feature 1..20: note = Description of Artificial Sequence: Synthetic oligonucleotide
  misc_feature 1..20: note = Target: ANGPTL3; (+) strand; PAM type: YTN; PAM sequence: TTT
  source 1..20: mol_type = other DNA
atacgaccctataaaatagg

SEQ ID NO: 14236 - DNA, 20 bp, synthetic construct
  misc_feature 1..20: note = Description of Artificial Sequence: Synthetic oligonucleotide
  misc_feature 1..20: note = Target: ANGPTL3; (+) strand; PAM type: YTN; PAM sequence: TTA
  source 1..20: mol_type = other DNA
tacgaccctataaaataggt

SEQ ID NO: 14237 - DNA, 20 bp, synthetic construct
  misc_feature 1..20: note = Description of Artificial Sequence: Synthetic oligonucleotide
  misc_feature 1..20: note = Target: ANGPTL3; (+) strand; PAM type: YTN; PAM sequence: CTA
  source 1..20: mol_type = other DNA
taaaataggtgttattctca

SEQ ID NO: 14238 - DNA, 20 bp, synthetic construct
  misc_feature 1..20: note = Description of Artificial Sequence: Synthetic oligonucleotide
  misc_feature 1..20: note = Target: ANGPTL3; (+) strand; PAM type: YTN; PAM sequence: TTA
  source 1..20: mol_type = other DNA
ttctcactggagagatgaga

SEQ ID NO: 14239 - DNA, 20 bp, synthetic construct
  misc_feature 1..20: note = Description of Artificial Sequence: Synthetic oligonucleotide
  misc_feature 1..20: note = Target: ANGPTL3; (+) strand; PAM type: YTN; PAM sequence: TTC
  source 1..20: mol_type = other DNA
tcactggagagatgagaaaa

SEQ ID NO: 14240 - DNA, 20 bp, synthetic construct
  misc_feature 1..20: note = Description of Artificial Sequence: Synthetic oligonucleotide
  misc_feature 1..20: note = Target: ANGPTL3; (+) strand; PAM type: YTN; PAM sequence: CTC
  source 1..20: mol_type = other DNA
actggagagatgagaaaaca

SEQ ID NO: 14241 - DNA, 20 bp, synthetic construct
  misc_feature 1..20: note = Description of Artificial Sequence: Synthetic oligonucleotide
  misc_feature 1..20: note = Target: ANGPTL3; (+) strand; PAM type: YTN; PAM sequence: CTG
  source 1..20: mol_type = other DNA
gagagatgagaaaacagggg

SEQ ID NO: 14242 - DNA, 20 bp, synthetic construct
  misc_feature 1..20: note = Description of Artificial Sequence: Synthetic oligonucleotide
  misc_feature 1..20: note = Target: ANGPTL3; (+) strand; PAM type: YTN; PAM sequence: TTC
  source 1..20: mol_type = other DNA
agagatgtgaagtaatttga

SEQ ID NO: 14243 - DNA, 20 bp, synthetic construct
  misc_feature 1..20: note = Description of Artificial Sequence: Synthetic oligonucleotide
  misc_feature 1..20: note = Target: ANGPTL3; (+) strand; PAM type: YTN; PAM sequence: TTT
  source 1..20: mol_type = other DNA
gaccaaaggtcacaaagctg

SEQ ID NO: 14244 - DNA, 20 bp, synthetic construct
  misc_feature 1..20: note = Description of Artificial Sequence: Synthetic oligonucleotide
  misc_feature 1..20: note = Target: ANGPTL3; (+) strand; PAM type: YTN; PAM sequence: TTG
  source 1..20: mol_type = other DNA
accaaaggtcacaaagctga

SEQ ID NO: 14245 - DNA, 20 bp, synthetic construct
  misc_feature 1..20: note = Description of Artificial Sequence: Synthetic oligonucleotide
  misc_feature 1..20: note = Target: ANGPTL3; (+) strand; PAM type: YTN; PAM sequence: CTG
  source 1..20: mol_type = other DNA
aagaatatgaaatccgggat

SEQ ID NO: 14246 - DNA, 20 bp, synthetic construct
  misc_feature 1..20: note = Description of Artificial Sequence: Synthetic oligonucleotide
  misc_feature 1..20: note = Target: ANGPTL3; (+) strand; PAM type: YTN; PAM sequence: TTC
  source 1..20: mol_type = other DNA
tgattcaggcagtcttattc

SEQ ID NO: 14247 - DNA, 20 bp, synthetic construct
  misc_feature 1..20: note = Description of Artificial Sequence: Synthetic oligonucleotide
  misc_feature 1..20: note = Target: ANGPTL3; (+) strand; PAM type: YTN; PAM sequence: CTG
  source 1..20: mol_type = other DNA
attcaggcagtcttattcca

SEQ ID NO: 14248 - DNA, 20 bp, synthetic construct
  misc_feature 1..20: note = Description of Artificial Sequence: Synthetic oligonucleotide
  misc_feature 1..20: note = Target: ANGPTL3; (+) strand; PAM type: YTN; PAM sequence: TTC
  source 1..20: mol_type = other DNA
aggcagtcttattccagaat

SEQ ID NO: 14249 - DNA, 20 bp, synthetic construct
  misc_feature 1..20: note = Description of Artificial Sequence: Synthetic oligonucleotide
  misc_feature 1..20: note = Target: ANGPTL3; (+) strand; PAM type: YTN; PAM sequence: CTT
  source 1..20: mol_type = other DNA
attccagaatcatgctctta

SEQ ID NO: 14250 - DNA, 20 bp, synthetic construct
  misc_feature 1..20: note = Description of Artificial Sequence: Synthetic oligonucleotide
  misc_feature 1..20: note = Target: ANGPTL3; (+) strand; PAM type: YTN; PAM sequence: TTA
  source 1..20: mol_type = other DNA
ttccagaatcatgctcttaa

SEQ ID NO: 14251 - DNA, 20 bp, synthetic construct
  misc_feature 1..20: note = Description of Artificial Sequence: Synthetic oligonucleotide
  misc_feature 1..20: note = Target: ANGPTL3; (+) strand; PAM type: YTN; PAM sequence: TTC
  source 1..20: mol_type = other DNA
cagaatcatgctcttaacca

SEQ ID NO: 14252 - DNA, 20 bp, synthetic construct
  misc_feature 1..20: note = Description of Artificial Sequence: Synthetic oligonucleotide
  misc_feature 1..20: note = Target: ANGPTL3; (+) strand; PAM type: YTN; PAM sequence: CTC
  source 1..20: mol_type = other DNA
ttaaccactatggaatactg

SEQ ID NO: 14253 - DNA, 20 bp, synthetic construct
  misc_feature 1..20: note = Description of Artificial Sequence: Synthetic oligonucleotide
  misc_feature 1..20: note = Target: ANGPTL3; (+) strand; PAM type: YTN; PAM sequence: CTT
  source 1..20: mol_type = other DNA
aaccactatggaatactgcc

SEQ ID NO: 14254 - DNA, 20 bp, synthetic construct
  misc_feature 1..20: note = Description of Artificial Sequence: Synthetic oligonucleotide
  misc_feature 1..20: note = Target: ANGPTL3; (+) strand; PAM type: YTN; PAM sequence: TTA
  source 1..20: mol_type = other DNA
accactatggaatactgcct

SEQ ID NO: 14255 - DNA, 20 bp, synthetic construct
  misc_feature 1..20: note = Description of Artificial Sequence: Synthetic oligonucleotide
  misc_feature 1..20: note = Target: ANGPTL3; (+) strand; PAM type: YTN; PAM sequence: CTA
  source 1..20: mol_type = other DNA
tggaatactgcctctactgt

SEQ ID NO: 14256 - DNA, 20 bp, synthetic construct
  misc_feature 1..20: note = Description of Artificial Sequence: Synthetic oligonucleotide
  misc_feature 1..20: note = Target: ANGPTL3; (+) strand; PAM type: YTN; PAM sequence: CTG
  source 1..20: mol_type = other DNA
cctctactgtaactattata

SEQ ID NO: 14257 - DNA, 20 bp, synthetic construct
  misc_feature 1..20: note = Description of Artificial Sequence: Synthetic oligonucleotide
  misc_feature 1..20: note = Target: ANGPTL3; (+) strand; PAM type: YTN; PAM sequence: CTC
  source 1..20: mol_type = other DNA
tactgtaactattataccca

SEQ ID NO: 14258 - DNA, 20 bp, synthetic construct
  misc_feature 1..20: note = Description of Artificial Sequence: Synthetic oligonucleotide
  misc_feature 1..20: note = Target: ANGPTL3; (+) strand; PAM type: YTN; PAM sequence: CTA
  source 1..20: mol_type = other DNA
ctgtaactattatacccaaa

SEQ ID NO: 14259 - DNA, 20 bp, synthetic construct
  misc_feature 1..20: note = Description of Artificial Sequence: Synthetic oligonucleotide
  misc_feature 1..20: note = Target: ANGPTL3; (+) strand; PAM type: YTN; PAM sequence: CTG
  source 1..20: mol_type = other DNA
taactattatacccaaaacc

SEQ ID NO: 14260 - DNA, 20 bp, synthetic construct
  misc_feature 1..20: note = Description of Artificial Sequence: Synthetic oligonucleotide
  misc_feature 1..20: note = Target: ANGPTL3; (+) strand; PAM type: YTN; PAM sequence: CTA
  source 1..20: mol_type = other DNA
ttatacccaaaacccttaat

SEQ ID NO: 14261 - DNA, 20 bp, synthetic construct
  misc_feature 1..20: note = Description of Artificial Sequence: Synthetic oligonucleotide
  misc_feature 1..20: note = Target: ANGPTL3; (+) strand; PAM type: YTN; PAM sequence: TTA
  source 1..20: mol_type = other DNA
tacccaaaacccttaatcct

SEQ ID NO: 14262 - DNA, 20 bp, synthetic construct
  misc_feature 1..20: note = Description of Artificial Sequence: Synthetic oligonucleotide
  misc_feature 1..20: note = Target: ANGPTL3; (+) strand; PAM type: YTN; PAM sequence: CTT
  source 1..20: mol_type = other DNA
aatcctaagtcatcaaaagg

SEQ ID NO: 14263 - DNA, 20 bp, synthetic construct
  misc_feature 1..20: note = Description of Artificial Sequence: Synthetic oligonucleotide
  misc_feature 1..20: note = Target: ANGPTL3; (+) strand; PAM type: YTN; PAM sequence: TTA
  source 1..20: mol_type = other DNA
atcctaagtcatcaaaagga

SEQ ID NO: 14264 - DNA, 20 bp, synthetic construct
  misc_feature 1..20: note = Description of Artificial Sequence: Synthetic oligonucleotide
  misc_feature 1..20: note = Target: ANGPTL3; (+) strand; PAM type: YTN; PAM sequence: CTA
  source 1..20: mol_type = other DNA
agtcatcaaaaggaagagcc

SEQ ID NO: 14265 - DNA, 20 bp, synthetic construct
  misc_feature 1..20: note = Description of Artificial Sequence: Synthetic oligonucleotide
  misc_feature 1..20: note = Target: ANGPTL3; (+) strand; PAM type: YTN; PAM sequence: CTC
  source 1..20: mol_type = other DNA
tattttacacaatgaagagg

SEQ ID NO: 14266 - DNA, 20 bp, synthetic construct
  misc_feature 1..20: note = Description of Artificial Sequence: Synthetic oligonucleotide
  misc_feature 1..20: note = Target: ANGPTL3; (+) strand; PAM type: YTN; PAM sequence: CTA
  source 1..20: mol_type = other DNA
ttttacacaatgaagaggca

SEQ ID NO: 14267 - DNA, 20 bp, synthetic construct
  misc_feature 1..20: note = Description of Artificial Sequence: Synthetic oligonucleotide
  misc_feature 1..20: note = Target: ANGPTL3; (+) strand; PAM type: YTN; PAM sequence: TTT
  source 1..20: mol_type = other DNA
tacacaatgaagaggcattt

SEQ ID NO: 14268 - DNA, 20 bp, synthetic construct
  misc_feature 1..20: note = Description of Artificial Sequence: Synthetic oligonucleotide
  misc_feature 1..20: note = Target: ANGPTL3; (+) strand; PAM type: YTN; PAM sequence: TTT
  source 1..20: mol_type = other DNA
acacaatgaagaggcatttc

SEQ ID NO: 14269 - DNA, 20 bp, synthetic construct
  misc_feature 1..20: note = Description of Artificial Sequence: Synthetic oligonucleotide
  misc_feature 1..20: note = Target: ANGPTL3; (+) strand; PAM type: YTN; PAM sequence: TTA
  source 1..20: mol_type = other DNA
cacaatgaagaggcatttct

SEQ ID NO: 14270 - DNA, 20 bp, synthetic construct
  misc_feature 1..20: note = Description of Artificial Sequence: Synthetic oligonucleotide
  misc_feature 1..20: note = Target: ANGPTL3; (+) strand; PAM type: YTN; PAM sequence: TTT
  source 1..20: mol_type = other DNA
ctaagaatagaaatttaggg

SEQ ID NO: 14271 - DNA, 20 bp, synthetic construct
  misc_feature 1..20: note = Description of Artificial Sequence: Synthetic oligonucleotide
  misc_feature 1..20: note = Target: ANGPTL3; (+) strand; PAM type: YTN; PAM sequence: TTC
  source 1..20: mol_type = other DNA
taagaatagaaatttaggga

SEQ ID NO: 14272 - DNA, 20 bp, synthetic construct
  misc_feature 1..20: note = Description of Artificial Sequence: Synthetic oligonucleotide
  misc_feature 1..20: note = Target: ANGPTL3; (+) strand; PAM type: YTN; PAM sequence: CTA
  source 1..20: mol_type = other DNA
agaatagaaatttagggacg

SEQ ID NO: 14273 - DNA, 20 bp, synthetic construct
  misc_feature 1..20: note = Description of Artificial Sequence: Synthetic oligonucleotide
  misc_feature 1..20: note = Target: ANGPTL3; (+) strand; PAM type: YTN; PAM sequence: TTT
  source 1..20: mol_type = other DNA
agggacgagcacagtggctt

SEQ ID NO: 14274 - DNA, 20 bp, synthetic construct
  misc_feature 1..20: note = Description of Artificial Sequence: Synthetic oligonucleotide
  misc_feature 1..20: note = Target: ANGPTL3; (+) strand; PAM type: YTN; PAM sequence: TTA
  source 1..20: mol_type = other DNA
gggacgagcacagtggctta

SEQ ID NO: 14275 - DNA, 20 bp, synthetic construct
  misc_feature 1..20: note = Description of Artificial Sequence: Synthetic oligonucleotide
  misc_feature 1..20: note = Target: ANGPTL3; (+) strand; PAM type: YTN; PAM sequence: CTT
  source 1..20: mol_type = other DNA
actcctttaatatcagcact

SEQ ID NO: 14276 - DNA, 20 bp, synthetic construct
  misc_feature 1..20: note = Description of Artificial Sequence: Synthetic oligonucleotide
  misc_feature 1..20: note = Target: ANGPTL3; (+) strand; PAM type: YTN; PAM sequence: TTA
  source 1..20: mol_type = other DNA
ctcctttaatatcagcactt

SEQ ID NO: 14277 - DNA, 20 bp, synthetic construct
  misc_feature 1..20: note = Description of Artificial Sequence: Synthetic oligonucleotide
  misc_feature 1..20: note = Target: ANGPTL3; (+) strand; PAM type: YTN; PAM sequence: CTC
  source 1..20: mol_type = other DNA
ctttaatatcagcactttga

SEQ ID NO: 14278 - DNA, 20 bp, synthetic construct
  misc_feature 1..20: note = Description of Artificial Sequence: Synthetic oligonucleotide
  misc_feature 1..20: note = Target: ANGPTL3; (+) strand; PAM type: YTN; PAM sequence: CTT
  source 1..20: mol_type = other DNA
taatatcagcactttgagag

SEQ ID NO: 14279 - DNA, 20 bp, synthetic construct
  misc_feature 1..20: note = Description of Artificial Sequence: Synthetic oligonucleotide
  misc_feature 1..20: note = Target: ANGPTL3; (+) strand; PAM type: YTN; PAM sequence: TTT
  source 1..20: mol_type = other DNA
aatatcagcactttgagagg

SEQ ID NO: 14280 - DNA, 20 bp, synthetic construct
  misc_feature 1..20: note = Description of Artificial Sequence: Synthetic oligonucleotide
  misc_feature 1..20: note = Target: ANGPTL3; (+) strand; PAM type: YTN; PAM sequence: TTA
  source 1..20: mol_type = other DNA
atatcagcactttgagaggc

SEQ ID NO: 14281 - DNA, 20 bp, synthetic construct
  misc_feature 1..20: note = Description of Artificial Sequence: Synthetic oligonucleotide
  misc_feature 1..20: note = Target: ANGPTL3; (+) strand; PAM type: YTN; PAM sequence: CTT
  source 1..20: mol_type = other DNA
tgagaggctgatatgggagg

SEQ ID NO: 14282 - DNA, 20 bp, synthetic construct
  misc_feature 1..20: note = Description of Artificial Sequence: Synthetic oligonucleotide
  misc_feature 1..20: note = Target: ANGPTL3; (+) strand; PAM type: YTN; PAM sequence: TTT
  source 1..20: mol_type = other DNA
gagaggctgatatgggaggt

SEQ ID NO: 14283 - DNA, 20 bp, synthetic construct
  misc_feature 1..20: note = Description of Artificial Sequence: Synthetic oligonucleotide
  misc_feature 1..20: note = Target: ANGPTL3; (+) strand; PAM type: YTN; PAM sequence: TTG
  source 1..20: mol_type = other DNA
agaggctgatatgggaggtt

SEQ ID NO: 14284 - DNA, 20 bp, synthetic construct
  misc_feature 1..20: note = Description of Artificial Sequence: Synthetic oligonucleotide
  misc_feature 1..20: note = Target: ANGPTL3; (+) strand; PAM type: YTN; PAM sequence: CTG
  source 1..20: mol_type = other DNA
atatgggaggttcacttgaa

SEQ ID NO: 14285 - DNA, 20 bp, synthetic construct
  misc_feature 1..20: note = Description of Artificial Sequence: Synthetic oligonucleotide
  misc_feature 1..20: note = Target: ANGPTL3; (+) strand; PAM type: YTN; PAM sequence: TTC
  source 1..20: mol_type = other DNA
acttgaagtcaggagttcaa

SEQ ID NO: 14286 - DNA, 20 bp, synthetic construct
  misc_feature 1..20: note = Description of Artificial Sequence: Synthetic oligonucleotide
  misc_feature 1..20: note = Target: ANGPTL3; (+) strand; PAM type: YTN; PAM sequence: CTT
  source 1..20: mol_type = other DNA
gaagtcaggagttcaaggtc

SEQ ID NO: 14287 - DNA, 20 bp, synthetic construct
  misc_feature 1..20: note = Description of Artificial Sequence: Synthetic oligonucleotide
  misc_feature 1..20: note = Target: ANGPTL3; (+) strand; PAM type: YTN; PAM sequence: TTG
  source 1..20: mol_type = other DNA
aagtcaggagttcaaggtca

SEQ ID NO: 14288 - DNA, 20 bp, synthetic construct
  misc_feature 1..20: note = Description of Artificial Sequence: Synthetic oligonucleotide
  misc_feature 1..20: note = Target: ANGPTL3; (+) strand; PAM type: YTN; PAM sequence: TTC
  source 1..20: mol_type = other DNA
aaggtcagcttgggcaacat

SEQ ID NO: 14289 - DNA, 20 bp, synthetic construct
  misc_feature 1..20: note = Description of Artificial Sequence: Synthetic oligonucleotide
  misc_feature 1..20: note = Target: ANGPTL3; (+) strand; PAM type: YTN; PAM sequence: CTT
  source 1..20: mol_type = other DNA
gggcaacatagtgaaacaca

SEQ ID NO: 14290 - DNA, 20 bp, synthetic construct
  misc_feature 1..20: note = Description of Artificial Sequence: Synthetic oligonucleotide
  misc_feature 1..20: note = Target: ANGPTL3; (+) strand; PAM type: YTN; PAM sequence: TTG
  source 1..20: mol_type = other DNA
ggcaacatagtgaaacacag

SEQ ID NO: 14291 - DNA, 20 bp, synthetic construct
  misc_feature 1..20: note = Description of Artificial Sequence: Synthetic oligonucleotide
  misc_feature 1..20: note = Target: ANGPTL3; (+) strand; PAM type: YTN; PAM sequence: CTC
  source 1..20: mol_type = other DNA
tacaaaatatttaaaaatta

SEQ ID NO: 14292 - DNA, 20 bp, synthetic construct
  misc_feature 1..20: note = Description of Artificial Sequence: Synthetic oligonucleotide
  misc_feature 1..20: note = Target: ANGPTL3; (+) strand; PAM type: YTN; PAM sequence: CTA
  source 1..20: mol_type = other DNA
caaaatatttaaaaattagc

SEQ ID NO: 14293 - DNA, 20 bp, synthetic construct
  misc_feature 1..20: note = Description of Artificial Sequence: Synthetic oligonucleotide
  misc_feature 1..20: note = Target: ANGPTL3; (+) strand; PAM type: YTN; PAM sequence: TTT
  source 1..20: mol_type = other DNA
aaaaattagctgggtgtggt

SEQ ID NO: 14294 - DNA, 20 bp, synthetic construct
  misc_feature 1..20: note = Description of Artificial Sequence: Synthetic oligonucleotide
  misc_feature 1..20: note = Target: ANGPTL3; (+) strand; PAM type: YTN; PAM sequence: TTA
  source 1..20: mol_type = other DNA
aaaattagctgggtgtggtg

SEQ ID NO: 14295 - DNA, 20 bp, synthetic construct
  misc_feature 1..20: note = Description of Artificial Sequence: Synthetic oligonucleotide
  misc_feature 1..20: note = Target: ANGPTL3; (+) strand; PAM type: YTN; PAM sequence: TTA
  source 1..20: mol_type = other DNA
gctgggtgtggtggcatgca

SEQ ID NO: 14296 - DNA, 20 bp, synthetic construct
  misc_feature 1..20: note = Description of Artificial Sequence: Synthetic oligonucleotide
  misc_feature 1..20: note = Target: ANGPTL3; (+) strand; PAM type: YTN; PAM sequence: CTG
  source 1..20: mol_type = other DNA
ggtgtggtggcatgcatcta

SEQ ID NO: 14297 - DNA, 20 bp, synthetic construct
  misc_feature 1..20: note = Description of Artificial Sequence: Synthetic oligonucleotide
  misc_feature 1..20: note = Target: ANGPTL3; (+) strand; PAM type: YTN; PAM sequence: CTA
  source 1..20: mol_type = other DNA
tagtctcagctacttgggag

SEQ ID NO: 14298 - DNA, 20 bp, synthetic construct
  misc_feature 1..20: note = Description of Artificial Sequence: Synthetic oligonucleotide
  misc_feature 1..20: note = Target: ANGPTL3; (+) strand; PAM type: YTN; PAM sequence: CTC
  source 1..20: mol_type = other DNA
agctacttgggagacagagg

SEQ ID NO: 14299 - DNA, 20 bp, synthetic construct
  misc_feature 1..20: note = Description of Artificial Sequence: Synthetic oligonucleotide
  misc_feature 1..20: note = Target: ANGPTL3; (+) strand; PAM type: YTN; PAM sequence: CTA
  source 1..20: mol_type = other DNA
cttgggagacagagggagga

SEQ ID NO: 14300 - DNA, 20 bp, synthetic construct
  misc_feature 1..20: note = Description of Artificial Sequence: Synthetic oligonucleotide
  misc_feature 1..20: note = Target: ANGPTL3; (+) strand; PAM type: YTN; PAM sequence: CTT
  source 1..20: mol_type = other DNA
gggagacagagggaggaggc

SEQ ID NO: 14301 - DNA, 20 bp, synthetic construct
  misc_feature 1..20: note = Description of Artificial Sequence: Synthetic oligonucleotide
  misc_feature 1..20: note = Target: ANGPTL3; (+) strand; PAM type: YTN; PAM sequence: TTG
  source 1..20: mol_type = other DNA
ggagacagagggaggaggct

SEQ ID NO: 14302 - DNA, 20 bp, synthetic construct
  misc_feature 1..20: note = Description of Artificial Sequence: Synthetic oligonucleotide
  misc_feature 1..20: note = Target: ANGPTL3; (+) strand; PAM type: YTN; PAM sequence: CTT
  source 1..20: mol_type = other DNA
gctcgagcccaggagttcgt

SEQ ID NO: 14303 - DNA, 20 bp, synthetic construct
  misc_feature 1..20: note = Description of Artificial Sequence: Synthetic oligonucleotide
  misc_feature 1..20: note = Target: ANGPTL3; (+) strand; PAM type: YTN; PAM sequence: TTG
  source 1..20: mol_type = other DNA
ctcgagcccaggagttcgtg

SEQ ID NO: 14304 - DNA, 20 bp, synthetic construct
  misc_feature 1..20: note = Description of Artificial Sequence: Synthetic oligonucleotide
  misc_feature 1..20: note = Target: ANGPTL3; (+) strand; PAM type: YTN; PAM sequence: CTC
  source 1..20: mol_type = other DNA
gagcccaggagttcgtggct

SEQ ID NO: 14305 - DNA, 20 bp, synthetic construct
  misc_feature 1..20: note = Description of Artificial Sequence: Synthetic oligonucleotide
  misc_feature 1..20: note = Target: ANGPTL3; (+) strand; PAM type: YTN; PAM sequence: TTC
  source 1..20: mol_type = other DNA
gtggctatagtgagctatga

SEQ ID NO: 14306 - DNA, 20 bp, synthetic construct
  misc_feature 1..20: note = Description of Artificial Sequence: Synthetic oligonucleotide
  misc_feature 1..20: note = Target: ANGPTL3; (+) strand; PAM type: YTN; PAM sequence: CTA
  source 1..20: mol_type = other DNA
tagtgagctatgatcatgcc

SEQ ID NO: 14307 - DNA, 20 bp, synthetic construct
  misc_feature 1..20: note = Description of Artificial Sequence: Synthetic oligonucleotide
  misc_feature 1..20: note = Target: ANGPTL3; (+) strand; PAM type: YTN; PAM sequence: CTA
  source 1..20: mol_type = other DNA
tgatcatgccactgcactcc

SEQ ID NO: 14308 - DNA, 20 bp, synthetic construct
  misc_feature 1..20: note = Description of Artificial Sequence: Synthetic oligonucleotide
  misc_feature 1..20: note = Target: ANGPTL3; (+) strand; PAM type: YTN; PAM sequence: CTG
  source 1..20: mol_type = other DNA
cactccagcctggacaacag

SEQ ID NO: 14309 - DNA, 20 bp, synthetic construct
  misc_feature 1..20: note = Description of Artificial Sequence: Synthetic oligonucleotide
  misc_feature 1..20: note = Target: ANGPTL3; (+) strand; PAM type: YTN; PAM sequence: CTC
  source 1..20: mol_type = other DNA
cagcctggacaacagagcaa

SEQ ID NO: 14310 - DNA, 20 bp, synthetic construct
  misc_feature 1..20: note = Description of Artificial Sequence: Synthetic oligonucleotide
  misc_feature 1..20: note = Target: ANGPTL3; (+) strand; PAM type: YTN; PAM sequence: CTG
  source 1..20: mol_type = other DNA
gacaacagagcaagaccctg

SEQ ID NO: 14311 - DNA, 20 bp, synthetic construct
  misc_feature 1..20: note = Description of Artificial Sequence: Synthetic oligonucleotide
  misc_feature 1..20: note = Target: ANGPTL3; (+) strand; PAM type: YTN; PAM sequence: CTG
  source 1..20: mol_type = other DNA
tctctaaaaaagaaaagaaa

SEQ ID NO: 14312 - DNA, 20 bp, synthetic construct
  misc_feature 1..20: note = Description of Artificial Sequence: Synthetic oligonucleotide
  misc_feature 1..20: note = Target: ANGPTL3; (+) strand; PAM type: YTN; PAM sequence: CTC
  source 1..20: mol_type = other DNA
taaaaaagaaaagaaatttg

SEQ ID NO: 14313 - DNA, 20 bp, synthetic construct
  misc_feature 1..20: note = Description of Artificial Sequence: Synthetic oligonucleotide
  misc_feature 1..20: note = Target: ANGPTL3; (+) strand; PAM type: YTN; PAM sequence: CTA
  source 1..20: mol_type = other DNA
aaaaagaaaagaaatttgga

SEQ ID NO: 14314 - DNA, 20 bp, synthetic construct
  misc_feature 1..20: note = Description of Artificial Sequence: Synthetic oligonucleotide
  misc_feature 1..20: note = Target: ANGPTL3; (+) strand; PAM type: YTN; PAM sequence: TTT
  source 1..20: mol_type = other DNA
ggaaatggtttattttgtat

SEQ ID NO: 14315 - DNA, 20 bp, synthetic construct
  misc_feature 1..20: note = Description of Artificial Sequence: Synthetic oligonucleotide
  misc_feature 1..20: note = Target: ANGPTL3; (+) strand; PAM type: YTN; PAM sequence: TTG
  source 1..20: mol_type = other DNA
gaaatggtttattttgtatt

SEQ ID NO: 14316 - DNA, 20 bp, synthetic construct
  misc_feature 1..20: note = Description of Artificial Sequence: Synthetic oligonucleotide
  misc_feature 1..20: note = Target: ANGPTL3; (+) strand; PAM type: YTN; PAM sequence: TTT
  source 1..20: mol_type = other DNA
attttgtattaacaatttat

SEQ ID NO: 14317 - DNA, 20 bp, synthetic construct
  misc_feature 1..20: note = Description of Artificial Sequence: Synthetic oligonucleotide
  misc_feature 1..20: note = Target: ANGPTL3; (+) strand; PAM type: YTN; PAM sequence: TTA
  source 1..20: mol_type = other DNA
ttttgtattaacaatttata

SEQ ID NO: 14318 - DNA, 20 bp, synthetic construct
  misc_feature 1..20: note = Description of Artificial Sequence: Synthetic oligonucleotide
  misc_feature 1..20: note = Target: ANGPTL3; (+) strand; PAM type: YTN; PAM sequence: TTT
  source 1..20: mol_type = other DNA
tgtattaacaatttataatt

SEQ ID NO: 14319 - DNA, 20 bp, synthetic construct
  misc_feature 1..20: note = Description of Artificial Sequence: Synthetic oligonucleotide
  misc_feature 1..20: note = Target: ANGPTL3; (+) strand; PAM type: YTN; PAM sequence: TTT
  source 1..20: mol_type = other DNA
gtattaacaatttataattt

SEQ ID NO: 14320 - DNA, 20 bp, synthetic construct
  misc_feature 1..20: note = Description of Artificial Sequence: Synthetic oligonucleotide
  misc_feature 1..20: note = Target: ANGPTL3; (+) strand; PAM type: YTN; PAM sequence: TTG
  source 1..20: mol_type = other DNA
tattaacaatttataattta

SEQ ID NO: 14321 - DNA, 20 bp, synthetic construct
  misc_feature 1..20: note = Description of Artificial Sequence: Synthetic oligonucleotide
  misc_feature 1..20: note = Target: ANGPTL3; (+) strand; PAM type: YTN; PAM sequence: TTA
  source 1..20: mol_type = other DNA
acaatttataatttacactg

SEQ ID NO: 14322 - DNA, 20 bp, synthetic construct
  misc_feature 1..20: note = Description of Artificial Sequence: Synthetic oligonucleotide
  misc_feature 1..20: note = Target: ANGPTL3; (+) strand; PAM type: YTN; PAM sequence: TTT
  source 1..20: mol_type = other DNA
ataatttacactgaaattta

SEQ ID NO: 14323 - DNA, 20 bp, synthetic construct
  misc_feature 1..20: note = Description of Artificial Sequence: Synthetic oligonucleotide
  misc_feature 1..20: note = Target: ANGPTL3; (+) strand; PAM type: YTN; PAM sequence: TTA
  source 1..20: mol_type = other DNA
taatttacactgaaatttat

SEQ ID NO: 14324 - DNA, 20 bp, synthetic construct
  misc_feature 1..20: note = Description of Artificial Sequence: Synthetic oligonucleotide
  misc_feature 1..20: note = Target: ANGPTL3; (+) strand; PAM type: YTN; PAM sequence: TTT
  source 1..20: mol_type = other DNA
acactgaaatttattatgat

SEQ ID NO: 14325 - DNA, 20 bp, synthetic construct
  misc_feature 1..20: note = Description of Artificial Sequence: Synthetic oligonucleotide
  misc_feature 1..20: note = Target: ANGPTL3; (+) strand; PAM type: YTN; PAM sequence: TTA
  source 1..20: mol_type = other DNA
cactgaaatttattatgata

SEQ ID NO: 14326 - DNA, 20 bp, synthetic construct
  misc_feature 1..20: note = Description of Artificial Sequence: Synthetic oligonucleotide
  misc_feature 1..20: note = Target: ANGPTL3; (+) strand; PAM type: YTN; PAM sequence: CTG
  source 1..20: mol_type = other DNA
aaatttattatgataaaact

SEQ ID NO: 14327 - DNA, 20 bp, synthetic construct
  misc_feature 1..20: note = Description of Artificial Sequence: Synthetic oligonucleotide
  misc_feature 1..20: note = Target: ANGPTL3; (+) strand; PAM type: YTN; PAM sequence: TTT
  source 1..20: mol_type = other DNA
attatgataaaacttttccc

SEQ ID NO: 14328 - DNA, 20 bp, synthetic construct
  misc_feature 1..20: note = Description of Artificial Sequence: Synthetic oligonucleotide
  misc_feature 1..20: note = Target: ANGPTL3; (+) strand; PAM type: YTN; PAM sequence: TTA
  source 1..20: mol_type = other DNA
ttatgataaaacttttccct

SEQ ID NO: 14329 - DNA, 20 bp, synthetic construct
  misc_feature 1..20: note = Description of Artificial Sequence: Synthetic oligonucleotide
  misc_feature 1..20: note = Target: ANGPTL3; (+) strand; PAM type: YTN; PAM sequence: TTA
  source 1..20: mol_type = other DNA
tgataaaacttttccctgtg

SEQ ID NO: 14330 - DNA, 20 bp, synthetic construct
  misc_feature 1..20: note = Description of Artificial Sequence: Synthetic oligonucleotide
  misc_feature 1..20: note = Target: ANGPTL3; (+) strand; PAM type: YTN; PAM sequence: CTT
  source 1..20: mol_type = other DNA
ttccctgtgttaaaaagcta

SEQ ID NO: 14331 - DNA, 20 bp, synthetic construct
  misc_feature 1..20: note = Description of Artificial Sequence: Synthetic oligonucleotide
  misc_feature 1..20: note = Target: ANGPTL3; (+) strand; PAM type: YTN; PAM sequence: TTT
  source 1..20: mol_type = other DNA
tccctgtgttaaaaagctat

SEQ ID NO: 14332 - DNA, 20 bp, synthetic construct
  misc_feature 1..20: note = Description of Artificial Sequence: Synthetic oligonucleotide
  misc_feature 1..20: note = Target: ANGPTL3; (+) strand; PAM type: YTN; PAM sequence: TTT
  source 1..20: mol_type = other DNA
ccctgtgttaaaaagctatt

SEQ ID NO: 14333 - DNA, 20 bp, synthetic construct
  misc_feature 1..20: note = Description of Artificial Sequence: Synthetic oligonucleotide
  misc_feature 1..20: note = Target: ANGPTL3; (+) strand; PAM type: YTN; PAM sequence: TTC
  source 1..20: mol_type = other DNA
cctgtgttaaaaagctatta

SEQ ID NO: 14334 - DNA, 20 bp, synthetic construct
  misc_feature 1..20: note = Description of Artificial Sequence: Synthetic oligonucleotide
  misc_feature 1..20: note = Target: ANGPTL3; (+) strand; PAM type: YTN; PAM sequence: CTG
  source 1..20: mol_type = other DNA
tgttaaaaagctattaactt

SEQ ID NO: 14335 - DNA, 20 bp, synthetic construct
  misc_feature 1..20: note = Description of Artificial Sequence: Synthetic oligonucleotide
  misc_feature 1..20: note = Target: ANGPTL3; (+) strand; PAM type: YTN; PAM sequence: TTA
  source 1..20: mol_type = other DNA
aaaagctattaactttatga

SEQ ID NO: 14336 - DNA, 20 bp, synthetic construct
  misc_feature 1..20: note = Description of Artificial Sequence: Synthetic oligonucleotide
  misc_feature 1..20: note = Target: ANGPTL3; (+) strand; PAM type: YTN; PAM sequence: CTA
  source 1..20: mol_type = other DNA
ttaactttatgaaaaatttc

SEQ ID NO: 14337 - DNA, 20 bp, synthetic construct
  misc_feature 1..20: note = Description of Artificial Sequence: Synthetic oligonucleotide
  misc_feature 1..20: note = Target: ANGPTL3; (+) strand; PAM type: YTN; PAM sequence: TTA
  source 1..20: mol_type = other DNA
actttatgaaaaatttcttt

SEQ ID NO: 14338 - DNA, 20 bp, synthetic construct
  misc_feature 1..20: note = Description of Artificial Sequence: Synthetic oligonucleotide
  misc_feature 1..20: note = Target: ANGPTL3; (+) strand; PAM type: YTN; PAM sequence: CTT
  source 1..20: mol_type = other DNA
tatgaaaaatttcttttagg

SEQ ID NO: 14339 - DNA, 20 bp, synthetic construct
  misc_feature 1..20: note = Description of Artificial Sequence: Synthetic oligonucleotide
  misc_feature 1..20: note = Target: ANGPTL3; (+) strand; PAM type: YTN; PAM sequence: TTT
  source 1..20: mol_type = other DNA
atgaaaaatttcttttaggt

SEQ ID NO: 14340 - DNA, 20 bp, synthetic construct
  misc_feature 1..20: note = Description of Artificial Sequence: Synthetic oligonucleotide
  misc_feature 1..20: note = Target: ANGPTL3; (+) strand; PAM type: YTN; PAM sequence: TTA
  source 1..20: mol_type = other DNA
tgaaaaatttcttttaggta

SEQ ID NO: 14341 - DNA, 20 bp, synthetic construct
  misc_feature 1..20: note = Description of Artificial Sequence: Synthetic oligonucleotide
  misc_feature 1..20: note = Target: ANGPTL3; (+) strand; PAM type: YTN; PAM sequence: TTT
  source 1..20: mol_type = other DNA
cttttaggtaaggttgatta

SEQ ID NO: 14342 - DNA, 20 bp, synthetic construct
  misc_feature 1..20: note = Description of Artificial Sequence: Synthetic oligonucleotide
  misc_feature 1..20: note = Target: ANGPTL3; (+) strand; PAM type: YTN; PAM sequence: TTC
  source 1..20: mol_type = other DNA
ttttaggtaaggttgattat

SEQ ID NO: 14343 - DNA, 20 bp, synthetic construct
  misc_feature 1..20: note = Description of Artificial Sequence: Synthetic oligonucleotide
  misc_feature 1..20: note = Target: ANGPTL3; (+) strand; PAM type: YTN; PAM sequence: CTT
  source 1..20: mol_type = other DNA
ttaggtaaggttgattatat

SEQ ID NO: 14344 - DNA, 20 bp, synthetic construct
  misc_feature 1..20: note = Description of Artificial Sequence: Synthetic oligonucleotide
  misc_feature 1..20: note = Target: ANGPTL3; (+) strand; PAM type: YTN; PAM sequence: TTT
  source 1..20: mol_type = other DNA
taggtaaggttgattatata

SEQ ID NO: 14345 - DNA, 20 bp, synthetic construct
  misc_feature 1..20: note = Description of Artificial Sequence: Synthetic oligonucleotide
  misc_feature 1..20: note = Target: ANGPTL3; (+) strand; PAM type: YTN; PAM sequence: TTT
  source 1..20: mol_type = other DNA
aggtaaggttgattatatat

SEQ ID NO: 14346 - DNA, 20 bp, synthetic construct
  misc_feature 1..20: note = Description of Artificial Sequence: Synthetic oligonucleotide
  misc_feature 1..20: note = Target: ANGPTL3; (+) strand; PAM type: YTN; PAM sequence: TTA
  source 1..20: mol_type = other DNA
ggtaaggttgattatatata

SEQ ID NO: 14347 - DNA, 20 bp, synthetic construct
  misc_feature 1..20: note = Description of Artificial Sequence: Synthetic oligonucleotide
  misc_feature 1..20: note = Target: ANGPTL3; (+) strand; PAM type: YTN; PAM sequence: TTG
  source 1..20: mol_type = other DNA
attatatatacccacacaca

SEQ ID NO: 14348 - DNA, 20 bp, synthetic construct
  misc_feature 1..20: note = Description of Artificial Sequence: Synthetic oligonucleotide
  misc_feature 1..20: note = Target: ANGPTL3; (+) strand; PAM type: YTN; PAM sequence: TTA
  source 1..20: mol_type = other DNA
tatatacccacacacataca

SEQ ID NO: 14349 - DNA, 20 bp, synthetic construct
  misc_feature 1..20: note = Description of Artificial Sequence: Synthetic oligonucleotide
  misc_feature 1..20: note = Target: ANGPTL3; (+) strand; PAM type: YTN; PAM sequence: TTA
  source 1..20: mol_type = other DNA
aaagttagtttcatgtgaca

SEQ ID NO: 14350 - DNA, 20 bp, synthetic construct
  misc_feature 1..20: note = Description of Artificial Sequence: Synthetic oligonucleotide
  misc_feature 1..20: note = Target: ANGPTL3; (+) strand; PAM type: YTN; PAM sequence: TTA
  source 1..20: mol_type = other DNA
gtttcatgtgacataataac

SEQ ID NO: 14351 - DNA, 20 bp, synthetic construct
  misc_feature 1..20: note = Description of Artificial Sequence: Synthetic oligonucleotide
  misc_feature 1..20: note = Target: ANGPTL3; (+) strand; PAM type: YTN; PAM sequence: TTT
  source 1..20: mol_type = other DNA
catgtgacataataactagc

SEQ ID NO: 14352 - DNA, 20 bp, synthetic construct
  misc_feature 1..20: note = Description of Artificial Sequence: Synthetic oligonucleotide
  misc_feature 1..20: note = Target: ANGPTL3; (+) strand; PAM type: YTN; PAM sequence: TTC
  source 1..20: mol_type = other DNA
atgtgacataataactagca

SEQ ID NO: 14353 - DNA, 20 bp, synthetic construct
  misc_feature 1..20: note = Description of Artificial Sequence: Synthetic oligonucleotide
  misc_feature 1..20: note = Target: ANGPTL3; (+) strand; PAM type: YTN; PAM sequence: CTA
  source 1..20: mol_type = other DNA
gcattttgagcactacctgt

SEQ ID NO: 14354 - DNA, 20 bp, synthetic construct
  misc_feature 1..20: note = Description of Artificial Sequence: Synthetic oligonucleotide
  misc_feature 1..20: note = Target: ANGPTL3; (+) strand; PAM type: YTN; PAM sequence: TTT
  source 1..20: mol_type = other DNA
tgagcactacctgtttgccc

SEQ ID NO: 14355 - DNA, 20 bp, synthetic construct
  misc_feature 1..20: note = Description of Artificial Sequence: Synthetic oligonucleotide
  misc_feature 1..20: note = Target: ANGPTL3; (+) strand; PAM type: YTN; PAM sequence: TTT
  source 1..20: mol_type = other DNA
gagcactacctgtttgccca

SEQ ID NO: 14356 - DNA, 20 bp, synthetic construct
  misc_feature 1..20: note = Description of Artificial Sequence: Synthetic oligonucleotide
  misc_feature 1..20: note = Target: ANGPTL3; (+) strand; PAM type: YTN; PAM sequence: TTG
  source 1..20: mol_type = other DNA
agcactacctgtttgcccag

SEQ ID NO: 14357 - DNA, 20 bp, synthetic construct
  misc_feature 1..20: note = Description of Artificial Sequence: Synthetic oligonucleotide
  misc_feature 1..20: note = Target: ANGPTL3; (+) strand; PAM type: YTN; PAM sequence: CTA
  source 1..20: mol_type = other DNA
cctgtttgcccagcactgtt

SEQ ID NO: 14358 - DNA, 20 bp, synthetic construct
  misc_feature 1..20: note = Description of Artificial Sequence: Synthetic oligonucleotide
  misc_feature 1..20: note = Target: ANGPTL3; (+) strand; PAM type: YTN; PAM sequence: CTG
  source 1..20: mol_type = other DNA
tttgcccagcactgttctaa

SEQ ID NO: 14359 - DNA, 20 bp, synthetic construct
  misc_feature 1..20: note = Description of Artificial Sequence: Synthetic oligonucleotide
  misc_feature 1..20: note = Target: ANGPTL3; (+) strand; PAM type: YTN; PAM sequence: TTT
  source 1..20: mol_type = other DNA
gcccagcactgttctaagtg

SEQ ID NO: 14360 - DNA, 20 bp, synthetic construct
  misc_feature 1..20: note = Description of Artificial Sequence: Synthetic oligonucleotide
  misc_feature 1..20: note = Target: ANGPTL3; (+) strand; PAM type: YTN; PAM sequence: TTG
  source 1..20: mol_type = other DNA
cccagcactgttctaagtgc

SEQ ID NO: 14361 - DNA, 20 bp, synthetic construct
  misc_feature 1..20: note = Description of Artificial Sequence: Synthetic oligonucleotide
  misc_feature 1..20: note = Target: ANGPTL3; (+) strand; PAM type: YTN; PAM sequence: CTG
  source 1..20: mol_type = other DNA
ttctaagtgctctacatgta

SEQ ID NO: 14362 - DNA, 20 bp, synthetic construct
  misc_feature 1..20: note = Description of Artificial Sequence: Synthetic oligonucleotide
  misc_feature 1..20: note = Target: ANGPTL3; (+) strand; PAM type: YTN; PAM sequence: TTC
  source 1..20: mol_type = other DNA
taagtgctctacatgtatta

SEQ ID NO: 14363 - DNA, 20 bp, synthetic construct
  misc_feature 1..20: note = Description of Artificial Sequence: Synthetic oligonucleotide
  misc_feature 1..20: note = Target: ANGPTL3; (+) strand; PAM type: YTN; PAM sequence: CTA
  source 1..20: mol_type = other DNA
agtgctctacatgtattatt

SEQ ID NO: 14364 - DNA, 20 bp, synthetic construct
  misc_feature 1..20: note = Description of Artificial Sequence: Synthetic oligonucleotide
  misc_feature 1..20: note = Target: ANGPTL3; (+) strand; PAM type: YTN; PAM sequence: CTC
  source 1..20: mol_type = other DNA
tacatgtattattgttaaat

SEQ ID NO: 14365 - DNA, 20 bp, synthetic construct
  misc_feature 1..20: note = Description of Artificial Sequence: Synthetic oligonucleotide
  misc_feature 1..20: note = Target: ANGPTL3; (+) strand; PAM type: YTN; PAM sequence: CTA
  source 1..20: mol_type = other DNA
catgtattattgttaaatta

SEQ ID NO: 14366 - DNA, 20 bp, synthetic construct
  misc_feature 1..20: note = Description of Artificial Sequence: Synthetic oligonucleotide
  misc_feature 1..20: note = Target: ANGPTL3; (+) strand; PAM type: YTN; PAM sequence: TTA
  source 1..20: mol_type = other DNA
ttgttaaattatcataacac

SEQ ID NO: 14367 - DNA, 20 bp, synthetic construct
  misc_feature 1..20: note = Description of Artificial Sequence: Synthetic oligonucleotide
  misc_feature 1..20: note = Target: ANGPTL3; (+) strand; PAM type: YTN; PAM sequence: TTG
  source 1..20: mol_type = other DNA
ttaaattatcataacactat

SEQ ID NO: 14368 - DNA, 20 bp, synthetic construct
  misc_feature 1..20: note = Description of Artificial Sequence: Synthetic oligonucleotide
  misc_feature 1..20: note = Target: ANGPTL3; (+) strand; PAM type: YTN; PAM sequence: TTA
  source 1..20: mol_type = other DNA
aattatcataacactatgaa

SEQ ID NO: 14369 - DNA, 20 bp, synthetic construct
  misc_feature 1..20: note = Description of Artificial Sequence: Synthetic oligonucleotide
  misc_feature 1..20: note = Target: ANGPTL3; (+) strand; PAM type: YTN; PAM sequence: TTA
  source 1..20: mol_type = other DNA
tcataacactatgaattatg

SEQ ID NO: 14370 - DNA, 20 bp, synthetic construct
  misc_feature 1..20: note = Description of Artificial Sequence: Synthetic oligonucleotide
  misc_feature 1..20: note = Target: ANGPTL3; (+) strand; PAM type: YTN; PAM sequence: CTA
  source 1..20: mol_type = other DNA
tgaattatgtactataatta

SEQ ID NO: 14371 - DNA, 20 bp, synthetic construct
  misc_feature 1..20: note = Description of Artificial Sequence: Synthetic oligonucleotide
  misc_feature 1..20: note = Target: ANGPTL3; (+) strand; PAM type: YTN; PAM sequence: TTA
  source 1..20: mol_type = other DNA
tgtactataattaccccagc

SEQ ID NO: 14372 - DNA, 20 bp, synthetic construct
  misc_feature 1..20: note = Description of Artificial Sequence: Synthetic oligonucleotide
  misc_feature 1..20: note = Target: ANGPTL3; (+) strand; PAM type: YTN; PAM sequence: CTA
  source 1..20: mol_type = other DNA
taattaccccagctttacag

SEQ ID NO: 14373 - DNA, 20 bp, synthetic construct
  misc_feature 1..20: note = Description of Artificial Sequence: Synthetic oligonucleotide
  misc_feature 1..20: note = Target: ANGPTL3; (+) strand; PAM type: YTN; PAM sequence: TTA
  source 1..20: mol_type = other DNA
ccccagctttacagatgagg

SEQ ID NO: 14374 - DNA, 20 bp, synthetic construct
  misc_feature 1..20: note = Description of Artificial Sequence: Synthetic oligonucleotide
  misc_feature 1..20: note = Target: ANGPTL3; (+) strand; PAM type: YTN; PAM sequence: CTT
  source 1..20: mol_type = other DNA
tacagatgaggagactaatc

SEQ ID NO: 14375 - DNA, 20 bp, synthetic construct
  misc_feature 1..20: note = Description of Artificial Sequence: Synthetic oligonucleotide
  misc_feature 1..20: note = Target: ANGPTL3; (+) strand; PAM type: YTN; PAM sequence: TTT
  source 1..20: mol_type = other DNA
acagatgaggagactaatcc

SEQ ID NO: 14376 - DNA, 20 bp, synthetic construct
  misc_feature 1..20: note = Description of Artificial Sequence: Synthetic oligonucleotide
  misc_feature 1..20: note = Target: ANGPTL3; (+) strand; PAM type: YTN; PAM sequence: TTA
  source 1..20: mol_type = other DNA
cagatgaggagactaatcca

SEQ ID NO: 14377 - DNA, 20 bp, synthetic construct
  misc_feature 1..20: note = Description of Artificial Sequence: Synthetic oligonucleotide
  misc_feature 1..20: note = Target: ANGPTL3; (+) strand; PAM type: YTN; PAM sequence: CTA
  source 1..20: mol_type = other DNA
atccatggggaggttaagta

SEQ ID NO: 14378 - DNA, 20 bp, synthetic construct
  misc_feature 1..20: note = Description of Artificial Sequence: Synthetic oligonucleotide
  misc_feature 1..20: note = Target: ANGPTL3; (+) strand; PAM type: YTN; PAM sequence: TTA
  source 1..20: mol_type = other DNA
agtaacttgtccaaggccag

SEQ ID NO: 14379 - DNA, 20 bp, synthetic construct
  misc_feature 1..20: note = Description of Artificial Sequence: Synthetic oligonucleotide
  misc_feature 1..20: note = Target: ANGPTL3; (+) strand; PAM type: YTN; PAM sequence: CTT
  source 1..20: mol_type = other DNA
gtccaaggccagacagctag

SEQ ID NO: 14380 - DNA, 20 bp, synthetic construct
  misc_feature 1..20: note = Description of Artificial Sequence: Synthetic oligonucleotide
  misc_feature 1..20: note = Target: ANGPTL3; (+) strand; PAM type: YTN; PAM sequence: TTG
  source 1..20: mol_type = other DNA
tccaaggccagacagctaga

SEQ ID NO: 14381 - DNA, 20 bp, synthetic construct
  misc_feature 1..20: note = Description of Artificial Sequence: Synthetic oligonucleotide
  misc_feature 1..20: note = Target: ANGPTL3; (+) strand; PAM type: YTN; PAM sequence: CTA
  source 1..20: mol_type = other DNA
gagccggcttttggacccac

SEQ ID NO: 14382 - DNA, 20 bp, synthetic construct
  misc_feature 1..20: note = Description of Artificial Sequence: Synthetic oligonucleotide
  misc_feature 1..20: note = Target: ANGPTL3; (+) strand; PAM type: YTN; PAM sequence: CTT
  source 1..20: mol_type = other DNA
ttggacccacaccacagtct

SEQ ID NO: 14383 - DNA, 20 bp, synthetic construct
  misc_feature 1..20: note = Description of Artificial Sequence: Synthetic oligonucleotide
  misc_feature 1..20: note = Target: ANGPTL3; (+) strand; PAM type: YTN; PAM sequence: TTT
  source 1..20: mol_type = other DNA
tggacccacaccacagtctg

SEQ ID NO: 14384 - DNA, 20 bp, synthetic construct
  misc_feature 1..20: note = Description of Artificial Sequence: Synthetic oligonucleotide
  misc_feature 1..20: note = Target: ANGPTL3; (+) strand; PAM type: YTN; PAM sequence: TTT
  source 1..20: mol_type = other DNA
ggacccacaccacagtctga

SEQ ID NO: 14385 - DNA, 20 bp, synthetic construct
  misc_feature 1..20: note = Description of Artificial Sequence: Synthetic oligonucleotide
  misc_feature 1..20: note = Target: ANGPTL3; (+) strand; PAM type: YTN; PAM sequence: TTG
  source 1..20: mol_type = other DNA
gacccacaccacagtctgac

SEQ ID NO: 14386 - DNA, 20 bp, synthetic construct
  misc_feature 1..20: note = Description of Artificial Sequence: Synthetic oligonucleotide
  misc_feature 1..20: note = Target: ANGPTL3; (+) strand; PAM type: YTN; PAM sequence: CTG
  source 1..20: mol_type = other DNA
actccagcacccatattctt

SEQ ID NO: 14387 - DNA, 20 bp, synthetic construct
  misc_feature 1..20: note = Description of Artificial Sequence: Synthetic oligonucleotide
  misc_feature 1..20: note = Target: ANGPTL3; (+) strand; PAM type: YTN; PAM sequence: CTC
  source 1..20: mol_type = other DNA
cagcacccatattcttaaca

SEQ ID NO: 14388 - DNA, 20 bp, synthetic construct
  misc_feature 1..20: note = Description of Artificial Sequence: Synthetic oligonucleotide
  misc_feature 1..20: note = Target: ANGPTL3; (+) strand; PAM type: YTN; PAM sequence: TTC
  source 1..20: mol_type = other DNA
ttaacaatttcaccatatta

SEQ ID NO: 14389 - DNA, 20 bp, synthetic construct
  misc_feature 1..20: note = Description of Artificial Sequence: Synthetic oligonucleotide
  misc_feature 1..20: note = Target: ANGPTL3; (+) strand; PAM type: YTN; PAM sequence: CTT
  source 1..20: mol_type = other DNA
aacaatttcaccatattaat

SEQ ID NO: 14390 - DNA, 20 bp, synthetic construct
  misc_feature 1..20: note = Description of Artificial Sequence: Synthetic oligonucleotide
  misc_feature 1..20: note = Target: ANGPTL3; (+) strand; PAM type: YTN; PAM sequence: TTA
  source 1..20: mol_type = other DNA
acaatttcaccatattaata

SEQ ID NO: 14391 - DNA, 20 bp, synthetic construct
  misc_feature 1..20: note = Description of Artificial Sequence: Synthetic oligonucleotide
  misc_feature 1..20: note = Target: ANGPTL3; (+) strand; PAM type: YTN; PAM sequence: TTT
  source 1..20: mol_type = other DNA
caccatattaatatgtcaag

SEQ ID NO: 14392 - DNA, 20 bp, synthetic construct
  misc_feature 1..20: note = Description of Artificial Sequence: Synthetic oligonucleotide
  misc_feature 1..20: note = Target: ANGPTL3; (+) strand; PAM type: YTN; PAM sequence: TTC
  source 1..20: mol_type = other DNA
accatattaatatgtcaaga

SEQ ID NO: 14393 - DNA, 20 bp, synthetic construct
  misc_feature 1..20: note = Description of Artificial Sequence: Synthetic oligonucleotide
  misc_feature 1..20: note = Target: ANGPTL3; (+) strand; PAM type: YTN; PAM sequence: TTA
  source 1..20: mol_type = other DNA
atatgtcaagattaagcagt

SEQ ID NO: 14394 - DNA, 20 bp, synthetic construct
  misc_feature 1..20: note = Description of Artificial Sequence: Synthetic oligonucleotide
  misc_feature 1..20: note = Target: ANGPTL3; (+) strand; PAM type: YTN; PAM sequence: TTA
  source 1..20: mol_type = other DNA
agcagttttaaaggatgcta

SEQ ID NO: 14395 - DNA, 20 bp, synthetic construct
  misc_feature 1..20: note = Description of Artificial Sequence: Synthetic oligonucleotide
  misc_feature 1..20: note = Target: ANGPTL3; (+) strand; PAM type: YTN; PAM sequence: TTT
  source 1..20: mol_type = other DNA
taaaggatgctattttctca

SEQ ID NO: 14396 - DNA, 20 bp, synthetic construct
  misc_feature 1..20: note = Description of Artificial Sequence: Synthetic oligonucleotide
  misc_feature 1..20: note = Target: ANGPTL3; (+) strand; PAM type: YTN; PAM sequence: TTT
  source 1..20: mol_type = other DNA
aaaggatgctattttctcac

SEQ ID NO: 14397 - DNA, 20 bp, synthetic construct
  misc_feature 1..20: note = Description of Artificial Sequence: Synthetic oligonucleotide
  misc_feature 1..20: note = Target: ANGPTL3; (+) strand; PAM type: YTN; PAM sequence: TTA
  source 1..20: mol_type = other DNA
aaggatgctattttctcaca

SEQ ID NO: 14398 - DNA, 20 bp, synthetic construct
  misc_feature 1..20: note = Description of Artificial Sequence: Synthetic oligonucleotide
  misc_feature 1..20: note = Target: ANGPTL3; (+) strand; PAM type: YTN; PAM sequence: CTA
  source 1..20: mol_type = other DNA
ttttctcacaaatttcttaa

SEQ ID NO: 14399 - DNA, 20 bp, synthetic construct
  misc_feature 1..20: note = Description of Artificial Sequence: Synthetic oligonucleotide
  misc_feature 1..20: note = Target: ANGPTL3; (+) strand; PAM type: YTN; PAM sequence: TTT
  source 1..20: mol_type = other DNA
tctcacaaatttcttaatat

SEQ ID NO: 14400 - DNA, 20 bp, synthetic construct
  misc_feature 1..20: note = Description of Artificial Sequence: Synthetic oligonucleotide
  misc_feature 1..20: note = Target: ANGPTL3; (+) strand; PAM type: YTN; PAM sequence: TTT
  source 1..20: mol_type = other DNA
ctcacaaatttcttaatatg

SEQ ID NO: 14401 - DNA, 20 bp, synthetic construct
  misc_feature 1..20: note = Description of Artificial Sequence: Synthetic oligonucleotide
  misc_feature 1..20: note = Target: ANGPTL3; (+) strand; PAM type: YTN; PAM sequence: TTC
  source 1..20: mol_type = other DNA
tcacaaatttcttaatatga

SEQ ID NO: 14402 - DNA, 20 bp, synthetic construct
  misc_feature 1..20: note = Description of Artificial Sequence: Synthetic oligonucleotide
  misc_feature 1..20: note = Target: ANGPTL3; (+) strand; PAM type: YTN; PAM sequence: CTC
  source 1..20: mol_type = other DNA
acaaatttcttaatatgaac

SEQ ID NO: 14403 - DNA, 20 bp, synthetic construct
  misc_feature 1..20: note = Description of Artificial Sequence: Synthetic oligonucleotide
  misc_feature 1..20: note = Target: ANGPTL3; (+) strand; PAM type: YTN; PAM sequence: TTT
  source 1..20: mol_type = other DNA
cttaatatgaacactcaata

SEQ ID NO: 14404 - DNA, 20 bp, synthetic construct
  misc_feature 1..20: note = Description of Artificial Sequence: Synthetic oligonucleotide
  misc_feature 1..20: note = Target: ANGPTL3; (+) strand; PAM type: YTN; PAM sequence: TTC
  source 1..20: mol_type = other DNA
ttaatatgaacactcaataa

SEQ ID NO: 14405 - DNA, 20 bp, synthetic construct
  misc_feature 1..20: note = Description of Artificial Sequence: Synthetic oligonucleotide
  misc_feature 1..20: note = Target: ANGPTL3; (+) strand; PAM type: YTN; PAM sequence: CTT
  source 1..20: mol_type = other DNA
aatatgaacactcaataaga

SEQ ID NO: 14406 - DNA, 20 bp, synthetic construct
  misc_feature 1..20: note = Description of Artificial Sequence: Synthetic oligonucleotide
  misc_feature 1..20: note = Target: ANGPTL3; (+) strand; PAM type: YTN; PAM sequence: TTA
  source 1..20: mol_type = other DNA
atatgaacactcaataagaa

SEQ ID NO: 14407 - DNA, 20 bp, synthetic construct
  misc_feature 1..20: note = Description of Artificial Sequence: Synthetic oligonucleotide
  misc_feature 1..20: note = Target: ANGPTL3; (+) strand; PAM type: YTN; PAM sequence: CTC
  source 1..20: mol_type = other DNA
aataagaataatcactaata

SEQ ID NO: 14408 - DNA, 20 bp, synthetic construct
  misc_feature 1..20: note = Description of Artificial Sequence: Synthetic oligonucleotide
  misc_feature 1..20: note = Target: ANGPTL3; (+) strand; PAM type: YTN; PAM sequence: CTA
  source 1..20: mol_type = other DNA
atataagcatttagtatttt

SEQ ID NO: 14409 - DNA, 20 bp, synthetic construct
  misc_feature 1..20: note = Description of Artificial Sequence: Synthetic oligonucleotide
  misc_feature 1..20: note = Target: ANGPTL3; (+) strand; PAM type: YTN; PAM sequence: TTT
  source 1..20: mol_type = other DNA
agtatttttttaacactaag

SEQ ID NO: 14410 - DNA, 20 bp, synthetic construct
  misc_feature 1..20: note = Description of Artificial Sequence: Synthetic oligonucleotide
  misc_feature 1..20: note = Target: ANGPTL3; (+) strand; PAM type: YTN; PAM sequence: TTA
  source 1..20: mol_type = other DNA
gtatttttttaacactaagt

SEQ ID NO: 14411 - DNA, 20 bp, synthetic construct
  misc_feature 1..20: note = Description of Artificial Sequence: Synthetic oligonucleotide
  misc_feature 1..20: note = Target: ANGPTL3; (+) strand; PAM type: YTN; PAM sequence: TTT
  source 1..20: mol_type = other DNA
ttttaacactaagttggaag

SEQ ID NO: 14412 - DNA, 20 bp, synthetic construct
  misc_feature 1..20: note = Description of Artificial Sequence: Synthetic oligonucleotide
  misc_feature 1..20: note = Target: ANGPTL3; (+) strand; PAM type: YTN; PAM sequence: TTT
  source 1..20: mol_type = other DNA
tttaacactaagttggaagc

SEQ ID NO: 14413 - DNA, 20 bp, synthetic construct
  misc_feature 1..20: note = Description of Artificial Sequence: Synthetic oligonucleotide
  misc_feature 1..20: note = Target: ANGPTL3; (+) strand; PAM type: YTN; PAM sequence: TTT
  source 1..20: mol_type = other DNA
ttaacactaagttggaagca

SEQ ID NO: 14414 - DNA, 20 bp, synthetic construct
  misc_feature 1..20: note = Description of Artificial Sequence: Synthetic oligonucleotide
  misc_feature 1..20: note = Target: ANGPTL3; (+) strand; PAM type: YTN; PAM sequence: TTT
  source 1..20: mol_type = other DNA
taacactaagttggaagcat

SEQ ID NO: 14415 - DNA, 20 bp, synthetic construct
  misc_feature 1..20: note = Description of Artificial Sequence: Synthetic oligonucleotide
  misc_feature 1..20: note = Target: ANGPTL3; (+) strand; PAM type: YTN; PAM sequence: TTT
  source 1..20: mol_type = other DNA
aacactaagttggaagcata

SEQ ID NO: 14416 - DNA, 20 bp, synthetic construct
  misc_feature 1..20: note = Description of Artificial Sequence: Synthetic oligonucleotide
  misc_feature 1..20: note = Target: ANGPTL3; (+) strand; PAM type: YTN; PAM sequence: TTA
  source 1..20: mol_type = other DNA
acactaagttggaagcatag

SEQ ID NO: 14417 - DNA, 20 bp, synthetic construct
  misc_feature 1..20: note = Description of Artificial Sequence: Synthetic oligonucleotide
  misc_feature 1..20: note = Target: ANGPTL3; (+) strand; PAM type: YTN; PAM sequence: CTA
  source 1..20: mol_type = other DNA
agttggaagcatagtggaac

SEQ ID NO: 14418 - DNA, 20 bp, synthetic construct
  misc_feature 1..20: note = Description of Artificial Sequence: Synthetic oligonucleotide
  misc_feature 1..20: note = Target: ANGPTL3; (+) strand; PAM type: YTN; PAM sequence: TTG
  source 1..20: mol_type = other DNA
gaagcatagtggaacattta

SEQ ID NO: 14419 - DNA, 20 bp, synthetic construct
  misc_feature 1..20: note = Description of Artificial Sequence: Synthetic oligonucleotide
  misc_feature 1..20: note = Target: ANGPTL3; (+) strand; PAM type: YTN; PAM sequence: TTT
  source 1..20: mol_type = other DNA
atttttagaaatattattaa

SEQ ID NO: 14420 - DNA, 20 bp, synthetic construct
  misc_feature 1..20: note = Description of Artificial Sequence: Synthetic oligonucleotide
  misc_feature 1..20: note = Target: ANGPTL3; (+) strand; PAM type: YTN; PAM sequence: TTA
  source 1..20: mol_type = other DNA
tttttagaaatattattaat

SEQ ID NO: 14421 - DNA, 20 bp, synthetic construct
  misc_feature 1..20: note = Description of Artificial Sequence: Synthetic oligonucleotide
  misc_feature 1..20: note = Target: ANGPTL3; (+) strand; PAM type: YTN; PAM sequence: TTT
  source 1..20: mol_type = other DNA
ttagaaatattattaattgg

SEQ ID NO: 14422 - DNA, 20 bp, synthetic construct
  misc_feature 1..20: note = Description of Artificial Sequence: Synthetic oligonucleotide
  misc_feature 1..20: note = Target: ANGPTL3; (+) strand; PAM type: YTN; PAM sequence: TTT
  source 1..20: mol_type = other DNA
tagaaatattattaattggc

SEQ ID NO: 14423 - DNA, 20 bp, synthetic construct
  misc_feature 1..20: note = Description of Artificial Sequence: Synthetic oligonucleotide
  misc_feature 1..20: note = Target: ANGPTL3; (+) strand; PAM type: YTN; PAM sequence: TTT
  source 1..20: mol_type = other DNA
agaaatattattaattggct

SEQ ID NO: 14424 - DNA, 20 bp, synthetic construct
  misc_feature 1..20: note = Description of Artificial Sequence: Synthetic oligonucleotide
  misc_feature 1..20: note = Target: ANGPTL3; (+) strand; PAM type: YTN; PAM sequence: TTA
  source 1..20: mol_type = other DNA
gaaatattattaattggctg

SEQ ID NO: 14425 - DNA, 20 bp, synthetic construct
  misc_feature 1..20: note = Description of Artificial Sequence: Synthetic oligonucleotide
  misc_feature 1..20: note = Target: ANGPTL3; (+) strand; PAM type: YTN; PAM sequence: TTA
  source 1..20: mol_type = other DNA
ttaattggctgggctcacgc

SEQ ID NO: 14426 - DNA, 20 bp, synthetic construct
  misc_feature 1..20: note = Description of Artificial Sequence: Synthetic oligonucleotide
  misc_feature 1..20: note = Target: ANGPTL3; (+) strand; PAM type: YTN; PAM sequence: TTA
  source 1..20: mol_type = other DNA
attggctgggctcacgcttg

SEQ ID NO: 14427 - DNA, 20 bp, synthetic construct
  misc_feature 1..20: note = Description of Artificial Sequence: Synthetic oligonucleotide
  misc_feature 1..20: note = Target: ANGPTL3; (+) strand; PAM type: YTN; PAM sequence: TTG
  source 1..20: mol_type = other DNA
gctgggctcacgcttgtaat

SEQ ID NO: 14428 - DNA, 20 bp, synthetic construct
  misc_feature 1..20: note = Description of Artificial Sequence: Synthetic oligonucleotide
  misc_feature 1..20: note = Target: ANGPTL3; (+) strand; PAM type: YTN; PAM sequence: CTG
  source 1..20: mol_type = other DNA
ggctcacgcttgtaatcggc

SEQ ID NO: 14429 - DNA, 20 bp, synthetic construct
  misc_feature 1..20: note = Description of Artificial Sequence: Synthetic oligonucleotide
  misc_feature 1..20: note = Target: ANGPTL3; (+) strand; PAM type: YTN; PAM sequence: CTC
  source 1..20: mol_type = other DNA
acgcttgtaatcggctgggc

SEQ ID NO: 14430 - DNA, 20 bp, synthetic construct
  misc_feature 1..20: note = Description of Artificial Sequence: Synthetic oligonucleotide
  misc_feature 1..20: note = Target: ANGPTL3; (+) strand; PAM type: YTN; PAM sequence: CTT
  source 1..20: mol_type = other DNA
gtaatcggctgggctcatgc

SEQ ID NO: 14431 - DNA, 20 bp, synthetic construct
  misc_feature 1..20: note = Description of Artificial Sequence: Synthetic oligonucleotide
  misc_feature 1..20: note = Target: ANGPTL3; (+) strand; PAM type: YTN; PAM sequence: TTG
  source 1..20: mol_type = other DNA
taatcggctgggctcatgcc

SEQ ID NO: 14432 - DNA, 20 bp, synthetic construct
  misc_feature 1..20: note = Description of Artificial Sequence: Synthetic oligonucleotide
  misc_feature 1..20: note = Target: ANGPTL3; (+) strand; PAM type: YTN; PAM sequence: CTG
  source 1..20: mol_type = other DNA
ggctcatgcctgtaaatttt

SEQ ID NO: 14433 - DNA, 20 bp, synthetic construct
  misc_feature 1..20: note = Description of Artificial Sequence: Synthetic oligonucleotide
  misc_feature 1..20: note = Target: ANGPTL3; (+) strand; PAM type: YTN; PAM sequence: CTC
  source 1..20: mol_type = other DNA
atgcctgtaaattttgggag

SEQ ID NO: 14434 - DNA, 20 bp, synthetic construct
  misc_feature 1..20: note = Description of Artificial Sequence: Synthetic oligonucleotide
  misc_feature 1..20: note = Target: ANGPTL3; (+) strand; PAM type: YTN; PAM sequence: CTG
  source 1..20: mol_type = other DNA
taaattttgggaggccaagg

SEQ ID NO: 14435 - DNA, 20 bp, synthetic construct
  misc_feature 1..20: note = Description of Artificial Sequence: Synthetic oligonucleotide
  misc_feature 1..20: note = Target: ANGPTL3; (+) strand; PAM type: YTN; PAM sequence: TTT
  source 1..20: mol_type = other DNA
tgggaggccaaggtaaaaga

SEQ ID NO: 14436 - DNA, 20 bp, synthetic construct
  misc_feature 1..20: note = Description of Artificial Sequence: Synthetic oligonucleotide
  misc_feature 1..20: note = Target: ANGPTL3; (+) strand; PAM type: YTN; PAM sequence: TTT
  source 1..20: mol_type = other DNA
gggaggccaaggtaaaagaa

SEQ ID NO: 14437 - DNA, 20 bp, synthetic construct
  misc_feature 1..20: note = Description of Artificial Sequence: Synthetic oligonucleotide
  misc_feature 1..20: note = Target: ANGPTL3; (+) strand; PAM type: YTN; PAM sequence: TTG
  source 1..20: mol_type = other DNA
ggaggccaaggtaaaagaat

SEQ ID NO: 14438 - DNA, 20 bp, synthetic construct
  misc_feature 1..20: note = Description of Artificial Sequence: Synthetic oligonucleotide
  misc_feature 1..20: note = Target: ANGPTL3; (+) strand; PAM type: YTN; PAM sequence: TTG
  source 1..20: mol_type = other DNA
cttgagcccagtatttccag

SEQ ID NO: 14439 - DNA, 20 bp, synthetic construct
  misc_feature 1..20: note = Description of Artificial Sequence: Synthetic oligonucleotide
  misc_feature 1..20: note = Target: ANGPTL3; (+) strand; PAM type: YTN; PAM sequence: CTT
  source 1..20: mol_type = other DNA
gagcccagtatttccagacc

SEQ ID NO: 14440 - DNA, 20 bp, synthetic construct
  misc_feature 1..20: note = Description of Artificial Sequence: Synthetic oligonucleotide
  misc_feature 1..20: note = Target: ANGPTL3; (+) strand; PAM type: YTN; PAM sequence: TTG
  source 1..20: mol_type = other DNA
agcccagtatttccagacca

SEQ ID NO: 14441 - DNA, 20 bp, synthetic construct
  misc_feature 1..20: note = Description of Artificial Sequence: Synthetic oligonucleotide
  misc_feature 1..20: note = Target: ANGPTL3; (+) strand; PAM type: YTN; PAM sequence: TTT
  source 1..20: mol_type = other DNA
ccagaccagcatgggcaata

SEQ ID NO: 14442 - DNA, 20 bp, synthetic construct
  misc_feature 1..20: note = Description of Artificial Sequence: Synthetic oligonucleotide
  misc_feature 1..20: note = Target: ANGPTL3; (+) strand; PAM type: YTN; PAM sequence: TTC
  source 1..20: mol_type = other DNA
cagaccagcatgggcaatac

SEQ ID NO: 14443 - DNA, 20 bp, synthetic construct
  misc_feature 1..20: note = Description of Artificial Sequence: Synthetic oligonucleotide
  misc_feature 1..20: note = Target: ANGPTL3; (+) strand; PAM type: YTN; PAM sequence: TTA
  source 1..20: mol_type = other DNA
agacatcatctttaaaaaaa

SEQ ID NO: 14444 - DNA, 20 bp, synthetic construct
  misc_feature 1..20: note = Description of Artificial Sequence: Synthetic oligonucleotide
  misc_feature 1..20: note = Target: ANGPTL3; (+) strand; PAM type: YTN; PAM sequence: CTT
  source 1..20: mol_type = other DNA
taaaaaaaaaatgttattaa

SEQ ID NO: 14445 - DNA, 20 bp, synthetic construct
  misc_feature 1..20: note = Description of Artificial Sequence: Synthetic oligonucleotide
  misc_feature 1..20: note = Target: ANGPTL3; (+) strand; PAM type: YTN; PAM sequence: TTT
  source 1..20: mol_type = other DNA
aaaaaaaaaatgttattaat

SEQ ID NO: 14446 - DNA, 20 bp, synthetic construct
  misc_feature 1..20: note = Description of Artificial Sequence: Synthetic oligonucleotide
  misc_feature 1..20: note = Target: ANGPTL3; (+) strand; PAM type: YTN; PAM sequence: TTA
  source 1..20: mol_type = other DNA
aaaaaaaaatgttattaatc

SEQ ID NO: 14447 - DNA, 20 bp, synthetic construct
  misc_feature 1..20: note = Description of Artificial Sequence: Synthetic oligonucleotide
  misc_feature 1..20: note = Target: ANGPTL3; (+) strand; PAM type: YTN; PAM sequence: TTA
  source 1..20: mol_type = other DNA
ttaatctcctctttttgtta

SEQ ID NO: 14448 - DNA, 20 bp, synthetic construct
  misc_feature 1..20: note = Description of Artificial Sequence: Synthetic oligonucleotide
  misc_feature 1..20: note = Target: ANGPTL3; (+) strand; PAM type: YTN; PAM sequence: TTA
  source 1..20: mol_type = other DNA
atctcctctttttgttaaat

SEQ ID NO: 14449 - DNA, 20 bp, synthetic construct
  misc_feature 1..20: note = Description of Artificial Sequence: Synthetic oligonucleotide
  misc_feature 1..20: note = Target: ANGPTL3; (+) strand; PAM type: YTN; PAM sequence: CTC
  source 1..20: mol_type = other DNA
ctctttttgttaaatgtata

SEQ ID NO: 14450 - DNA, 20 bp, synthetic construct
  misc_feature 1..20: note = Description of Artificial Sequence: Synthetic oligonucleotide
  misc_feature 1..20: note = Target: ANGPTL3; (+) strand; PAM type: YTN; PAM sequence: CTC
  source 1..20: mol_type = other DNA
tttttgttaaatgtatatta

SEQ ID NO: 14451 - DNA, 20 bp, synthetic construct
  misc_feature 1..20: note = Description of Artificial Sequence: Synthetic oligonucleotide
  misc_feature 1..20: note = Target: ANGPTL3; (+) strand; PAM type: YTN; PAM sequence: CTT
  source 1..20: mol_type = other DNA
tttgttaaatgtatattatc

SEQ ID NO: 14452 - DNA, 20 bp, synthetic construct
  misc_feature 1..20: note = Description of Artificial Sequence: Synthetic oligonucleotide
  misc_feature 1..20: note = Target: ANGPTL3; (+) strand; PAM type: YTN; PAM sequence: TTT
  source 1..20: mol_type = other DNA
ttgttaaatgtatattatca

SEQ ID NO: 14453 - DNA, 20 bp, synthetic construct
  misc_feature 1..20: note = Description of Artificial Sequence: Synthetic oligonucleotide
  misc_feature 1..20: note = Target: ANGPTL3; (+) strand; PAM type: YTN; PAM sequence: TTT
  source 1..20: mol_type = other DNA
tgttaaatgtatattatcaa

SEQ ID NO: 14454 - DNA, 20 bp, synthetic construct
  misc_feature 1..20: note = Description of Artificial Sequence: Synthetic oligonucleotide
  misc_feature 1..20: note = Target: ANGPTL3; (+) strand; PAM type: YTN; PAM sequence: TTT
  source 1..20: mol_type = other DNA
gttaaatgtatattatcaaa

SEQ ID NO: 14455 - DNA, 20 bp, synthetic construct
  misc_feature 1..20: note = Description of Artificial Sequence: Synthetic oligonucleotide
  misc_feature 1..20: note = Target: ANGPTL3; (+) strand; PAM type: YTN; PAM sequence: TTG
  source 1..20: mol_type = other DNA
ttaaatgtatattatcaaaa

SEQ ID NO: 14456 - DNA, 20 bp, synthetic construct
  misc_feature 1..20: note = Description of Artificial Sequence: Synthetic oligonucleotide
  misc_feature 1..20: note = Target: ANGPTL3; (+) strand; PAM type: YTN; PAM sequence: TTA
  source 1..20: mol_type = other DNA
aatgtatattatcaaaattg

SEQ ID NO: 14457 - DNA, 20 bp, synthetic construct
  misc_feature 1..20: note = Description of Artificial Sequence: Synthetic oligonucleotide
  misc_feature 1..20: note = Target: ANGPTL3; (+) strand; PAM type: YTN; PAM sequence: TTA
  source 1..20: mol_type = other DNA
tcaaaattgttactaagcta

SEQ ID NO: 14458 - DNA, 20 bp, synthetic construct
  misc_feature 1..20: note = Description of Artificial Sequence: Synthetic oligonucleotide
  misc_feature 1..20: note = Target: ANGPTL3; (+) strand; PAM type: YTN; PAM sequence: TTG
  source 1..20: mol_type = other DNA
ttactaagctaacaaacttc

SEQ ID NO: 14459 - DNA, 20 bp, synthetic construct
  misc_feature 1..20: note = Description of Artificial Sequence: Synthetic oligonucleotide
  misc_feature 1..20: note = Target: ANGPTL3; (+) strand; PAM type: YTN; PAM sequence: TTA
  source 1..20: mol_type = other DNA
ctaagctaacaaacttcaga

SEQ ID NO: 14460 - DNA, 20 bp, synthetic construct
  misc_feature 1..20: note = Description of Artificial Sequence: Synthetic oligonucleotide
  misc_feature 1..20: note = Target: ANGPTL3; (+) strand; PAM type: YTN; PAM sequence: CTA
  source 1..20: mol_type = other DNA
agctaacaaacttcagaaaa

SEQ ID NO: 14461 - DNA, 20 bp, synthetic construct
  misc_feature 1..20: note = Description of Artificial Sequence: Synthetic oligonucleotide
  misc_feature 1..20: note = Target: ANGPTL3; (+) strand; PAM type: YTN; PAM sequence: CTA
  source 1..20: mol_type = other DNA
acaaacttcagaaaaactta

SEQ ID NO: 14462 - DNA, 20 bp, synthetic construct
  misc_feature 1..20: note = Description of Artificial Sequence: Synthetic oligonucleotide
  misc_feature 1..20: note = Target: ANGPTL3; (+) strand; PAM type: YTN; PAM sequence: CTT
  source 1..20: mol_type = other DNA
cagaaaaacttatgatgggc

SEQ ID NO: 14463 - DNA, 20 bp, synthetic construct
  misc_feature 1..20: note = Description of Artificial Sequence: Synthetic oligonucleotide
  misc_feature 1..20: note = Target: ANGPTL3; (+) strand; PAM type: YTN; PAM sequence: TTC
  source 1..20: mol_type = other DNA
agaaaaacttatgatgggca

SEQ ID NO: 14464 - DNA, 20 bp, synthetic construct
  misc_feature 1..20: note = Description of Artificial Sequence: Synthetic oligonucleotide
  misc_feature 1..20: note = Target: ANGPTL3; (+) strand; PAM type: YTN; PAM sequence: CTT
  source 1..20: mol_type = other DNA
atgatgggcaagctgcttgt

SEQ ID NO: 14465 - DNA, 20 bp, synthetic construct
  misc_feature 1..20: note = Description of Artificial Sequence: Synthetic oligonucleotide
  misc_feature 1..20: note = Target: ANGPTL3; (+) strand; PAM type: YTN; PAM sequence: TTA
  source 1..20: mol_type = other DNA
tgatgggcaagctgcttgtg

SEQ ID NO: 14466 - DNA, 20 bp, synthetic construct
  misc_feature 1..20: note = Description of Artificial Sequence: Synthetic oligonucleotide
  misc_feature 1..20: note = Target: ANGPTL3; (+) strand; PAM type: YTN; PAM sequence: CTG
  source 1..20: mol_type = other DNA
cttgtgacattgaaggtatt

SEQ ID NO: 14467 - DNA, 20 bp, synthetic construct
  misc_feature 1..20: note = Description of Artificial Sequence: Synthetic oligonucleotide
  misc_feature 1..20: note = Target: ANGPTL3; (+) strand; PAM type: YTN; PAM sequence: CTT
  source 1..20: mol_type = other DNA
gtgacattgaaggtatttaa

SEQ ID NO: 14468 - DNA, 20 bp, synthetic construct
  misc_feature 1..20: note = Description of Artificial Sequence: Synthetic oligonucleotide
  misc_feature 1..20: note = Target: ANGPTL3; (+) strand; PAM type: YTN; PAM sequence: TTG
  source 1..20: mol_type = other DNA
tgacattgaaggtatttaag

SEQ ID NO: 14469 - DNA, 20 bp, synthetic construct
  misc_feature 1..20: note = Description of Artificial Sequence: Synthetic oligonucleotide
  misc_feature 1..20: note = Target: ANGPTL3; (+) strand; PAM type: YTN; PAM sequence: TTG
  source 1..20: mol_type = other DNA
aaggtatttaagattcaatt

SEQ ID NO: 14470 - DNA, 20 bp, synthetic construct
  misc_feature 1..20: note = Description of Artificial Sequence: Synthetic oligonucleotide
  misc_feature 1..20: note = Target: ANGPTL3; (+) strand; PAM type: YTN; PAM sequence: TTT
  source 1..20: mol_type = other DNA
aagattcaattctagtttgg

SEQ ID NO: 14471 - DNA, 20 bp, synthetic construct
  misc_feature 1..20: note = Description of Artificial Sequence: Synthetic oligonucleotide
  misc_feature 1..20: note = Target: ANGPTL3; (+) strand; PAM type: YTN; PAM sequence: TTA
  source 1..20: mol_type = other DNA
agattcaattctagtttggt

SEQ ID NO: 14472 - DNA, 20 bp, synthetic construct
  misc_feature 1..20: note = Description of Artificial Sequence: Synthetic oligonucleotide
  misc_feature 1..20: note = Target: ANGPTL3; (+) strand; PAM type: YTN; PAM sequence: TTC
  source 1..20: mol_type = other DNA
aattctagtttggtcctaga

SEQ ID NO: 14473 - DNA, 20 bp, synthetic construct
  misc_feature 1..20: note = Description of Artificial Sequence: Synthetic oligonucleotide
  misc_feature 1..20: note = Target: ANGPTL3; (+) strand; PAM type: YTN; PAM sequence: TTC
  source 1..20: mol_type = other DNA
tagtttggtcctagatgacc

SEQ ID NO: 14474 - DNA, 20 bp, synthetic construct
  misc_feature 1..20: note = Description of Artificial Sequence: Synthetic oligonucleotide
  misc_feature 1..20: note = Target: ANGPTL3; (+) strand; PAM type: YTN; PAM sequence: CTA
  source 1..20: mol_type = other DNA
gtttggtcctagatgaccac

SEQ ID NO: 14475 - DNA, 20 bp, synthetic construct
  misc_feature 1..20: note = Description of Artificial Sequence: Synthetic oligonucleotide
  misc_feature 1..20: note = Target: ANGPTL3; (+) strand; PAM type: YTN; PAM sequence: TTT
  source 1..20: mol_type = other DNA
ggtcctagatgaccacatat

SEQ ID NO: 14476 - DNA, 20 bp, synthetic construct
  misc_feature 1..20: note = Description of Artificial Sequence: Synthetic oligonucleotide
  misc_feature 1..20: note = Target: ANGPTL3; (+) strand; PAM type: YTN; PAM sequence: TTG
  source 1..20: mol_type = other DNA
gtcctagatgaccacatatc

SEQ ID NO: 14477 - DNA, 20 bp, synthetic construct
  misc_feature 1..20: note = Description of Artificial Sequence: Synthetic oligonucleotide
  misc_feature 1..20: note = Target: ANGPTL3; (+) strand; PAM type: YTN; PAM sequence: CTA
  source 1..20: mol_type = other DNA
gatgaccacatatccattgt

SEQ ID NO: 14478 - DNA, 20 bp, synthetic construct
  misc_feature 1..20: note = Description of Artificial Sequence: Synthetic oligonucleotide
  misc_feature 1..20: note = Target: ANGPTL3; (+) strand; PAM type: YTN; PAM sequence: TTG
  source 1..20: mol_type = other DNA
ttccttcaacgagcacatgg

SEQ ID NO: 14479 - DNA, 20 bp, synthetic construct
  misc_feature 1..20: note = Description of Artificial Sequence: Synthetic oligonucleotide
  misc_feature 1..20: note = Target: ANGPTL3; (+) strand; PAM type: YTN; PAM sequence: TTC
  source 1..20: mol_type = other DNA
cttcaacgagcacatggtaa

SEQ ID NO: 14480 - DNA, 20 bp, synthetic construct
  misc_feature 1..20: note = Description of Artificial Sequence: Synthetic oligonucleotide
  misc_feature 1..20: note = Target: ANGPTL3; (+) strand; PAM type: YTN; PAM sequence: CTT
  source 1..20: mol_type = other DNA
caacgagcacatggtaaaga

SEQ ID NO: 14481 - DNA, 20 bp, synthetic construct
  misc_feature 1..20: note = Description of Artificial Sequence: Synthetic oligonucleotide
  misc_feature 1..20: note = Target: ANGPTL3; (+) strand; PAM type: YTN; PAM sequence: TTC
  source 1..20: mol_type = other DNA
aacgagcacatggtaaagag

SEQ ID NO: 14482 - DNA, 20 bp, synthetic construct
  misc_feature 1..20: note = Description of Artificial Sequence: Synthetic oligonucleotide
  misc_feature 1..20: note = Target: ANGPTL3; (+) strand; PAM type: YTN; PAM sequence: CTA
  source 1..20: mol_type = other DNA
gaacacagagacacagaaca

SEQ ID NO: 14483 - DNA, 20 bp, synthetic construct
  misc_feature 1..20: note = Description of Artificial Sequence: Synthetic oligonucleotide
  misc_feature 1..20: note = Target: ANGPTL3; (+) strand; PAM type: YTN; PAM sequence: CTT
  source 1..20: mol_type = other DNA
taatgacacttactatatat

SEQ ID NO: 14484 - DNA, 20 bp, synthetic construct
  misc_feature 1..20: note = Description of Artificial Sequence: Synthetic oligonucleotide
  misc_feature 1..20: note = Target: ANGPTL3; (+) strand; PAM type: YTN; PAM sequence: TTT
  source 1..20: mol_type = other DNA
aatgacacttactatatatg

SEQ ID NO: 14485 - DNA, 20 bp, synthetic construct
  misc_feature 1..20: note = Description of Artificial Sequence: Synthetic oligonucleotide
  misc_feature 1..20: note = Target: ANGPTL3; (+) strand; PAM type: YTN; PAM sequence: TTA
  source 1..20: mol_type = other DNA
atgacacttactatatatgg

SEQ ID NO: 14486 - DNA, 20 bp, synthetic construct
  misc_feature 1..20: note = Description of Artificial Sequence: Synthetic oligonucleotide
  misc_feature 1..20: note = Target: ANGPTL3; (+) strand; PAM type: YTN; PAM sequence: CTT
  source 1..20: mol_type = other DNA
actatatatgggattttgtg

SEQ ID NO: 14487 - DNA, 20 bp, synthetic construct
  misc_feature 1..20: note = Description of Artificial Sequence: Synthetic oligonucleotide
  misc_feature 1..20: note = Target: ANGPTL3; (+) strand; PAM type: YTN; PAM sequence: TTA
  source 1..20: mol_type = other DNA
ctatatatgggattttgtga

SEQ ID NO: 14488 - DNA, 20 bp, synthetic construct
  misc_feature 1..20: note = Description of Artificial Sequence: Synthetic oligonucleotide
  misc_feature 1..20: note = Target: ANGPTL3; (+) strand; PAM type: YTN; PAM sequence: CTA
  source 1..20: mol_type = other DNA
tatatgggattttgtgacaa

SEQ ID NO: 14489 - DNA, 20 bp, synthetic construct
  misc_feature 1..20: note = Description of Artificial Sequence: Synthetic oligonucleotide
  misc_feature 1..20: note = Target: ANGPTL3; (+) strand; PAM type: YTN; PAM sequence: TTT
  source 1..20: mol_type = other DNA
tgtgacaatatacaaggatg

SEQ ID NO: 14490 - DNA, 20 bp, synthetic construct
  misc_feature 1..20: note = Description of Artificial Sequence: Synthetic oligonucleotide
  misc_feature 1..20: note = Target: ANGPTL3; (+) strand; PAM type: YTN; PAM sequence: TTT
  source 1..20: mol_type = other DNA
gtgacaatatacaaggatgg

SEQ ID NO: 14491 - DNA, 20 bp, synthetic construct
  misc_feature 1..20: note = Description of Artificial Sequence: Synthetic oligonucleotide
  misc_feature 1..20: note = Target: ANGPTL3; (+) strand; PAM type: YTN; PAM sequence: TTG
  source 1..20: mol_type = other DNA
tgacaatatacaaggatggt

SEQ ID NO: 14492 - DNA, 20 bp, synthetic construct
  misc_feature 1..20: note = Description of Artificial Sequence: Synthetic oligonucleotide
  misc_feature 1..20: note = Target: ANGPTL3; (+) strand; PAM type: YTN; PAM sequence: TTA
  source 1..20: mol_type = other DNA
agacatataaggtgatgcaa

SEQ ID NO: 14493 - DNA, 20 bp, synthetic construct
  misc_feature 1..20: note = Description of Artificial Sequence: Synthetic oligonucleotide
  misc_feature 1..20: note = Target: ANGPTL3; (+) strand; PAM type: YTN; PAM sequence: TTA
  source 1..20: mol_type = other DNA
acaattatagtgacaaaaaa

SEQ ID NO: 14494 - DNA, 20 bp, synthetic construct
  misc_feature 1..20: note = Description of Artificial Sequence: Synthetic oligonucleotide
  misc_feature 1..20: note = Target: ANGPTL3; (+) strand; PAM type: YTN; PAM sequence: TTA
  source 1..20: mol_type = other DNA
tagtgacaaaaaatgaggag

SEQ ID NO: 14495 - DNA, 20 bp, synthetic construct
  misc_feature 1..20: note = Description of Artificial Sequence: Synthetic oligonucleotide
  misc_feature 1..20: note = Target: ANGPTL3; (+) strand; PAM type: YTN; PAM sequence: TTA
  source 1..20: mol_type = other DNA
tacattgatttatacagagt

SEQ ID NO: 14496 - DNA, 20 bp, synthetic construct
  misc_feature 1..20: note = Description of Artificial Sequence: Synthetic oligonucleotide
  misc_feature 1..20: note = Target: ANGPTL3; (+) strand; PAM type: YTN; PAM sequence: TTG
  source 1..20: mol_type = other DNA
atttatacagagtaccagag

SEQ ID NO: 14497 - DNA, 20 bp, synthetic construct
  misc_feature 1..20: note = Description of Artificial Sequence: Synthetic oligonucleotide
  misc_feature 1..20: note = Target: ANGPTL3; (+) strand; PAM type: YTN; PAM sequence: TTT
  source 1..20: mol_type = other DNA
atacagagtaccagaggaac

SEQ ID NO: 14498 - DNA, 20 bp, synthetic construct
  misc_feature 1..20: note = Description of Artificial Sequence: Synthetic oligonucleotide
  misc_feature 1..20: note = Target: ANGPTL3; (+) strand; PAM type: YTN; PAM sequence: TTA
  source 1..20: mol_type = other DNA
tacagagtaccagaggaaca

SEQ ID NO: 14499 - DNA, 20 bp, synthetic construct
  misc_feature 1..20: note = Description of Artificial Sequence: Synthetic oligonucleotide
  misc_feature 1..20: note = Target: ANGPTL3; (+) strand; PAM type: YTN; PAM sequence: TTG
  source 1..20: mol_type = other DNA
agagccgtaacaccacctga

SEQ ID NO: 14500 - DNA, 20 bp, synthetic construct
  misc_feature 1..20: note = Description of Artificial Sequence: Synthetic oligonucleotide
  misc_feature 1..20: note = Target: ANGPTL3; (+) strand; PAM type: YTN; PAM sequence: CTG
  source 1..20: mol_type = other DNA
agggagtggagaaaggcttc

SEQ ID NO: 14501 - DNA, 20 bp, synthetic construct
  misc_feature 1..20: note = Description of Artificial Sequence: Synthetic oligonucleotide
  misc_feature 1..20: note = Target: ANGPTL3; (+) strand; PAM type: YTN; PAM sequence: CTT
  source 1..20: mol_type = other DNA
cagagagaaagtgttttttg

SEQ ID NO: 14502 - DNA, 20 bp, synthetic construct
  misc_feature 1..20: note = Description of Artificial Sequence: Synthetic oligonucleotide
  misc_feature 1..20: note = Target: ANGPTL3; (+) strand; PAM type: YTN; PAM sequence: TTC
  source 1..20: mol_type = other DNA
agagagaaagtgttttttgg

SEQ ID NO: 14503 - DNA, 20 bp, synthetic construct
  misc_feature 1..20: note = Description of Artificial Sequence: Synthetic oligonucleotide
  misc_feature 1..20: note = Target: ANGPTL3; (+) strand; PAM type: YTN; PAM sequence: TTT
  source 1..20: mol_type = other DNA
tttggaatggatcactgttt

SEQ ID NO: 14504 - DNA, 20 bp, synthetic construct
  misc_feature 1..20: note = Description of Artificial Sequence: Synthetic oligonucleotide
  misc_feature 1..20: note = Target: ANGPTL3; (+) strand; PAM type: YTN; PAM sequence: TTT
  source 1..20: mol_type = other DNA
ttggaatggatcactgtttc

SEQ ID NO: 14505 - DNA, 20 bp, synthetic construct
  misc_feature 1..20: note = Description of Artificial Sequence: Synthetic oligonucleotide
  misc_feature 1..20: note = Target: ANGPTL3; (+) strand; PAM type: YTN; PAM sequence: TTT
  source 1..20: mol_type = other DNA
tggaatggatcactgtttcc

SEQ ID NO: 14506 - DNA, 20 bp, synthetic construct
  misc_feature 1..20: note = Description of Artificial Sequence: Synthetic oligonucleotide
  misc_feature 1..20: note = Target: ANGPTL3; (+) strand; PAM type: YTN; PAM sequence: TTT
  source 1..20: mol_type = other DNA
ggaatggatcactgtttcca

SEQ ID NO: 14507 - DNA, 20 bp, synthetic construct
  misc_feature 1..20: note = Description of Artificial Sequence: Synthetic oligonucleotide
  misc_feature 1..20: note = Target: ANGPTL3; (+) strand; PAM type: YTN; PAM sequence: TTG
  source 1..20: mol_type = other DNA
gaatggatcactgtttccaa

SEQ ID NO: 14508 - DNA, 20 bp, synthetic construct
  misc_feature 1..20: note = Description of Artificial Sequence: Synthetic oligonucleotide
  misc_feature 1..20: note = Target: ANGPTL3; (+) strand; PAM type: YTN; PAM sequence: CTG
  source 1..20: mol_type = other DNA
tttccaaaagaactaaagta

SEQ ID NO: 14509 - DNA, 20 bp, synthetic construct
  misc_feature 1..20: note = Description of Artificial Sequence: Synthetic oligonucleotide
  misc_feature 1..20: note = Target: ANGPTL3; (+) strand; PAM type: YTN; PAM sequence: TTT
  source 1..20: mol_type = other DNA
ccaaaagaactaaagtacag

SEQ ID NO: 14510 - DNA, 20 bp, synthetic construct
  misc_feature 1..20: note = Description of Artificial Sequence: Synthetic oligonucleotide
  misc_feature 1..20: note = Target: ANGPTL3; (+) strand; PAM type: YTN; PAM sequence: TTC
  source 1..20: mol_type = other DNA
caaaagaactaaagtacagt

SEQ ID NO: 14511 - DNA, 20 bp, synthetic construct
  misc_feature 1..20: note = Description of Artificial Sequence: Synthetic oligonucleotide
  misc_feature 1..20: note = Target: ANGPTL3; (+) strand; PAM type: YTN; PAM sequence: CTA
  source 1..20: mol_type = other DNA
aagtacagtttgagaaatgc

SEQ ID NO: 14512 - DNA, 20 bp, synthetic construct
  misc_feature 1..20: note = Description of Artificial Sequence: Synthetic oligonucleotide
  misc_feature 1..20: note = Target: ANGPTL3; (+) strand; PAM type: YTN; PAM sequence: TTT
  source 1..20: mol_type = other DNA
gagaaatgcatacttaattc

SEQ ID NO: 14513 - DNA, 20 bp, synthetic construct
  misc_feature 1..20: note = Description of Artificial Sequence: Synthetic oligonucleotide
  misc_feature 1..20: note = Target: ANGPTL3; (+) strand; PAM type: YTN; PAM sequence: TTG
  source 1..20: mol_type = other DNA
agaaatgcatacttaattca

SEQ ID NO: 14514 - DNA, 20 bp, synthetic construct
  misc_feature 1..20: note = Description of Artificial Sequence: Synthetic oligonucleotide
  misc_feature 1..20: note = Target: ANGPTL3; (+) strand; PAM type: YTN; PAM sequence: CTT
  source 1..20: mol_type = other DNA
aattcattacttttttcccc

SEQ ID NO: 14515 - DNA, 20 bp, synthetic construct
  misc_feature 1..20: note = Description of Artificial Sequence: Synthetic oligonucleotide
  misc_feature 1..20: note = Target: ANGPTL3; (+) strand; PAM type: YTN; PAM sequence: TTA
  source 1..20: mol_type = other DNA
attcattacttttttcccct

SEQ ID NO: 14516 - DNA, 20 bp, synthetic construct
  misc_feature 1..20: note = Description of Artificial Sequence: Synthetic oligonucleotide
  misc_feature 1..20: note = Target: ANGPTL3; (+) strand; PAM type: YTN; PAM sequence: TTC
  source 1..20: mol_type = other DNA
attacttttttcccctcaac

SEQ ID NO: 14517 - DNA, 20 bp, synthetic construct
  misc_feature 1..20: note = Description of Artificial Sequence: Synthetic oligonucleotide
  misc_feature 1..20: note = Target: ANGPTL3; (+) strand; PAM type: YTN; PAM sequence: TTA
  source 1..20: mol_type = other DNA
cttttttcccctcaacttta

SEQ ID NO: 14518 - DNA, 20 bp, synthetic construct
  misc_feature 1..20: note = Description of Artificial Sequence: Synthetic oligonucleotide
  misc_feature 1..20: note = Target: ANGPTL3; (+) strand; PAM type: YTN; PAM sequence: CTT
  source 1..20: mol_type = other DNA
ttttcccctcaactttaata

SEQ ID NO: 14519 - DNA, 20 bp, synthetic construct
  misc_feature 1..20: note = Description of Artificial Sequence: Synthetic oligonucleotide
  misc_feature 1..20: note = Target: ANGPTL3; (+) strand; PAM type: YTN; PAM sequence: TTT
  source 1..20: mol_type = other DNA
tttcccctcaactttaataa

SEQ ID NO: 14520 - DNA, 20 bp, synthetic construct
  misc_feature 1..20: note = Description of Artificial Sequence: Synthetic oligonucleotide
  misc_feature 1..20: note = Target: ANGPTL3; (+) strand; PAM type: YTN; PAM sequence: TTT
  source 1..20: mol_type = other DNA
ttcccctcaactttaataat

SEQ ID NO: 14521 - DNA, 20 bp, synthetic construct
  misc_feature 1..20: note = Description of Artificial Sequence: Synthetic oligonucleotide
  misc_feature 1..20: note = Target: ANGPTL3; (+) strand; PAM type: YTN; PAM sequence: TTT
  source 1..20: mol_type = other DNA
tcccctcaactttaataata

SEQ ID NO: 14522 - DNA, 20 bp, synthetic construct
  misc_feature 1..20: note = Description of Artificial Sequence: Synthetic oligonucleotide
  misc_feature 1..20: note = Target: ANGPTL3; (+) strand; PAM type: YTN; PAM sequence: TTT
  source 1..20: mol_type = other DNA
cccctcaactttaataataa

SEQ ID NO: 14523 - DNA, 20 bp, synthetic construct
  misc_feature 1..20: note = Description of Artificial Sequence: Synthetic oligonucleotide
  misc_feature 1..20: note = Target: ANGPTL3; (+) strand; PAM type: YTN; PAM sequence: TTC
  source 1..20: mol_type = other DNA
ccctcaactttaataataaa

SEQ ID NO: 14524 - DNA, 20 bp, synthetic construct
  misc_feature 1..20: note = Description of Artificial Sequence: Synthetic oligonucleotide
  misc_feature 1..20: note = Target: ANGPTL3; (+) strand; PAM type: YTN; PAM sequence: CTC
  source 1..20: mol_type = other DNA
aactttaataataaatttac

SEQ ID NO: 14525 - DNA, 20 bp, synthetic construct
  misc_feature 1..20: note = Description of Artificial Sequence: Synthetic oligonucleotide
  misc_feature 1..20: note = Target: ANGPTL3; (+) strand; PAM type: YTN; PAM sequence: CTT
  source 1..20: mol_type = other DNA
taataataaatttacccaac

SEQ ID NO: 14526 - DNA, 20 bp, synthetic construct
  misc_feature 1..20: note = Description of Artificial Sequence: Synthetic oligonucleotide
  misc_feature 1..20: note = Target: ANGPTL3; (+) strand; PAM type: YTN; PAM sequence: TTT
  source 1..20: mol_type = other DNA
aataataaatttacccaaca

SEQ ID NO: 14527 - DNA, 20 bp, synthetic construct
  misc_feature 1..20: note = Description of Artificial Sequence: Synthetic oligonucleotide
  misc_feature 1..20: note = Target: ANGPTL3; (+) strand; PAM type: YTN; PAM sequence: TTA
  source 1..20: mol_type = other DNA
ataataaatttacccaacaa

SEQ ID NO: 14528 - DNA, 20 bp, synthetic construct
  misc_feature 1..20: note = Description of Artificial Sequence: Synthetic oligonucleotide
  misc_feature 1..20: note = Target: ANGPTL3; (+) strand; PAM type: YTN; PAM sequence: TTT
  source 1..20: mol_type = other DNA
acccaacaaaaaagtttatt

SEQ ID NO: 14529 - DNA, 20 bp, synthetic construct
  misc_feature 1..20: note = Description of Artificial Sequence: Synthetic oligonucleotide
  misc_feature 1..20: note = Target: ANGPTL3; (+) strand; PAM type: YTN; PAM sequence: TTA
  source 1..20: mol_type = other DNA
cccaacaaaaaagtttattt

SEQ ID NO: 14530 - DNA, 20 bp, synthetic construct
  misc_feature 1..20: note = Description of Artificial Sequence: Synthetic oligonucleotide
  misc_feature 1..20: note = Target: ANGPTL3; (+) strand; PAM type: YTN; PAM sequence: TTT
  source 1..20: mol_type = other DNA
atttttgacttgtaaatctc

SEQ ID NO: 14531 - DNA, 20 bp, synthetic construct
  misc_feature 1..20: note = Description of Artificial Sequence: Synthetic oligonucleotide
  misc_feature 1..20: note = Target: ANGPTL3; (+) strand; PAM type: YTN; PAM sequence: TTA
  source 1..20: mol_type = other DNA
tttttgacttgtaaatctct

SEQ ID NO: 14532 - DNA, 20 bp, synthetic construct
  misc_feature 1..20: note = Description of Artificial Sequence: Synthetic oligonucleotide
  misc_feature 1..20: note = Target: ANGPTL3; (+) strand; PAM type: YTN; PAM sequence: TTT
  source 1..20: mol_type = other DNA
ttgacttgtaaatctcttaa

SEQ ID NO: 14533 - DNA, 20 bp, synthetic construct
  misc_feature 1..20: note = Description of Artificial Sequence: Synthetic oligonucleotide
  misc_feature 1..20: note = Target: ANGPTL3; (+) strand; PAM type: YTN; PAM sequence: TTT
  source 1..20: mol_type = other DNA
tgacttgtaaatctcttaaa

SEQ ID NO: 14534 - DNA, 20 bp, synthetic construct
  misc_feature 1..20: note = Description of Artificial Sequence: Synthetic oligonucleotide
  misc_feature 1..20: note = Target: ANGPTL3; (+) strand; PAM type: YTN; PAM sequence: TTT
  source 1..20: mol_type = other DNA
gacttgtaaatctcttaaaa

SEQ ID NO: 14535 - DNA, 20 bp, synthetic construct
  misc_feature 1..20: note = Description of Artificial Sequence: Synthetic oligonucleotide
  misc_feature 1..20: note = Target: ANGPTL3; (+) strand; PAM type: YTN; PAM sequence: TTG
  source 1..20: mol_type = other DNA
acttgtaaatctcttaaaat

SEQ ID NO: 14536 - DNA, 20 bp, synthetic construct
  misc_feature 1..20: note = Description of Artificial Sequence: Synthetic oligonucleotide
  misc_feature 1..20: note = Target: ANGPTL3; (+) strand; PAM type: YTN; PAM sequence: CTT
  source 1..20: mol_type = other DNA
gtaaatctcttaaaatcata

SEQ ID NO: 14537 - DNA, 20 bp, synthetic construct
  misc_feature 1..20: note = Description of Artificial Sequence: Synthetic oligonucleotide
  misc_feature 1..20: note = Target: ANGPTL3; (+) strand; PAM type: YTN; PAM sequence: TTG
  source 1..20: mol_type = other DNA
taaatctcttaaaatcataa

SEQ ID NO: 14538 - DNA, 20 bp, synthetic construct
  misc_feature 1..20: note = Description of Artificial Sequence: Synthetic oligonucleotide
  misc_feature 1..20: note = Target: ANGPTL3; (+) strand; PAM type: YTN; PAM sequence: CTC
  source 1..20: mol_type = other DNA
ttaaaatcataaaaaagtaa

SEQ ID NO: 14539 - DNA, 20 bp, synthetic construct
  misc_feature 1..20: note = Description of Artificial Sequence: Synthetic oligonucleotide
  misc_feature 1..20: note = Target: ANGPTL3; (+) strand; PAM type: YTN; PAM sequence: CTT
  source 1..20: mol_type = other DNA
aaaatcataaaaaagtaaaa

SEQ ID NO: 14540 - DNA, 20 bp, synthetic construct
  misc_feature 1..20: note = Description of Artificial Sequence: Synthetic oligonucleotide
  misc_feature 1..20: note = Target: ANGPTL3; (+) strand; PAM type: YTN; PAM sequence: TTA
  source 1..20: mol_type = other DNA
aaatcataaaaaagtaaaat

SEQ ID NO: 14541 - DNA, 20 bp, synthetic construct
  misc_feature 1..20: note = Description of Artificial Sequence: Synthetic oligonucleotide
  misc_feature 1..20: note = Target: ANGPTL3; (+) strand; PAM type: YTN; PAM sequence: TTA
  source 1..20: mol_type = other DNA
gcttttaaaaacaggtagtc

SEQ ID NO: 14542 - DNA, 20 bp, synthetic construct
  misc_feature 1..20: note = Description of Artificial Sequence: Synthetic oligonucleotide
  misc_feature 1..20: note = Target: ANGPTL3; (+) strand; PAM type: YTN; PAM sequence: CTT
  source 1..20: mol_type = other DNA
ttaaaaacaggtagtcacca

SEQ ID NO: 14543 - DNA, 20 bp, synthetic construct
  misc_feature 1..20: note = Description of Artificial Sequence: Synthetic oligonucleotide
  misc_feature 1..20: note = Target: ANGPTL3; (+) strand; PAM type: YTN; PAM sequence: TTT
  source 1..20: mol_type = other DNA
taaaaacaggtagtcaccat

SEQ ID NO: 14544 - DNA, 20 bp, synthetic construct
  misc_feature 1..20: note = Description of Artificial Sequence: Synthetic oligonucleotide
  misc_feature 1..20: note = Target: ANGPTL3; (+) strand; PAM type: YTN; PAM sequence: TTT
  source 1..20: mol_type = other DNA
aaaaacaggtagtcaccata

SEQ ID NO: 14545 - DNA, 20 bp, synthetic construct
  misc_feature 1..20: note = Description of Artificial Sequence: Synthetic oligonucleotide
  misc_feature 1..20: note = Target: ANGPTL3; (+) strand; PAM type: YTN; PAM sequence: TTA
  source 1..20: mol_type = other DNA
aaaacaggtagtcaccatag

SEQ ID NO: 14546 - DNA, 20 bp, synthetic construct
  misc_feature 1..20: note = Description of Artificial Sequence: Synthetic oligonucleotide
  misc_feature 1..20: note = Target: ANGPTL3; (+) strand; PAM type: YTN; PAM sequence: TTG
  source 1..20: mol_type = other DNA
aatgtgtagtttataataca

SEQ ID NO: 14547 - DNA, 20 bp, synthetic construct
  misc_feature 1..20: note = Description of Artificial Sequence: Synthetic oligonucleotide
  misc_feature 1..20: note = Target: ANGPTL3; (+) strand; PAM type: YTN; PAM sequence: TTT
  source 1..20: mol_type = other DNA
ataatacagcaaagttaaat

SEQ ID NO: 14548 - DNA, 20 bp, synthetic construct
  misc_feature 1..20: note = Description of Artificial Sequence: Synthetic oligonucleotide
  misc_feature 1..20: note = Target: ANGPTL3; (+) strand; PAM type: YTN; PAM sequence: TTA
  source 1..20: mol_type = other DNA
taatacagcaaagttaaata

SEQ ID NO: 14549 - DNA, 20 bp, synthetic construct
  misc_feature 1..20: note = Description of Artificial Sequence: Synthetic oligonucleotide
  misc_feature 1..20: note = Target: ANGPTL3; (+) strand; PAM type: YTN; PAM sequence: TTA
  source 1..20: mol_type = other DNA
aatacaatttcaaattacct

SEQ ID NO: 14550 - DNA, 20 bp, synthetic construct
  misc_feature 1..20: note = Description of Artificial Sequence: Synthetic oligonucleotide
  misc_feature 1..20: note = Target: ANGPTL3; (+) strand; PAM type: YTN; PAM sequence: TTT
  source 1..20: mol_type = other DNA
caaattacctattaagttag

SEQ ID NO: 14551 - DNA, 20 bp, synthetic construct
  misc_feature 1..20: note = Description of Artificial Sequence: Synthetic oligonucleotide
  misc_feature 1..20: note = Target: ANGPTL3; (+) strand; PAM type: YTN; PAM sequence: TTC
  source 1..20: mol_type = other DNA
aaattacctattaagttagt

SEQ ID NO: 14552 - DNA, 20 bp, synthetic construct
  misc_feature 1..20: note = Description of Artificial Sequence: Synthetic oligonucleotide
  misc_feature 1..20: note = Target: ANGPTL3; (+) strand; PAM type: YTN; PAM sequence: TTA
  source 1..20: mol_type = other DNA
cctattaagttagttgctca

SEQ ID NO: 14553 - DNA, 20 bp, synthetic construct
  misc_feature 1..20: note = Description of Artificial Sequence: Synthetic oligonucleotide
  misc_feature 1..20: note = Target: ANGPTL3; (+) strand; PAM type: YTN; PAM sequence: CTA
  source 1..20: mol_type = other DNA
ttaagttagttgctcatttc

SEQ ID NO: 14554 - DNA, 20 bp, synthetic construct
  misc_feature 1..20: note = Description of Artificial Sequence: Synthetic oligonucleotide
  misc_feature 1..20: note = Target: ANGPTL3; (+) strand; PAM type: YTN; PAM sequence: TTA
  source 1..20: mol_type = other DNA
agttagttgctcatttcttt

SEQ ID NO: 14555 - DNA, 20 bp, synthetic construct
  misc_feature 1..20: note = Description of Artificial Sequence: Synthetic oligonucleotide
  misc_feature 1..20: note = Target: ANGPTL3; (+) strand; PAM type: YTN; PAM sequence: TTA
  source 1..20: mol_type = other DNA
gttgctcatttctttgattt

SEQ ID NO: 14556 - DNA, 20 bp, synthetic construct
  misc_feature 1..20: note = Description of Artificial Sequence: Synthetic oligonucleotide
  misc_feature 1..20: note = Target: ANGPTL3; (+) strand; PAM type: YTN; PAM sequence: TTG
  source 1..20: mol_type = other DNA
ctcatttctttgatttcatt

SEQ ID NO: 14557 - DNA, 20 bp, synthetic construct
  misc_feature 1..20: note = Description of Artificial Sequence: Synthetic oligonucleotide
  misc_feature 1..20: note = Target: ANGPTL3; (+) strand; PAM type: YTN; PAM sequence: CTC
  source 1..20: mol_type = other DNA
atttctttgatttcatttag

SEQ ID NO: 14558 - DNA, 20 bp, synthetic construct
  misc_feature 1..20: note = Description of Artificial Sequence: Synthetic oligonucleotide
  misc_feature 1..20: note = Target: ANGPTL3; (+) strand; PAM type: YTN; PAM sequence: TTT
  source 1..20: mol_type = other DNA
ctttgatttcatttagcatt

SEQ ID NO: 14559 - DNA, 20 bp, synthetic construct
  misc_feature 1..20: note = Description of Artificial Sequence: Synthetic oligonucleotide
  misc_feature 1..20: note = Target: ANGPTL3; (+) strand; PAM type: YTN; PAM sequence: TTC
  source 1..20: mol_type = other DNA
tttgatttcatttagcattg

SEQ ID NO: 14560 - DNA, 20 bp, synthetic construct
  misc_feature 1..20: note = Description of Artificial Sequence: Synthetic oligonucleotide
  misc_feature 1..20: note = Target: ANGPTL3; (+) strand; PAM type: YTN; PAM sequence: CTT
  source 1..20: mol_type = other DNA
tgatttcatttagcattgat

SEQ ID NO: 14561 - DNA, 20 bp, synthetic construct
  misc_feature 1..20: note = Description of Artificial Sequence: Synthetic oligonucleotide
  misc_feature 1..20: note = Target: ANGPTL3; (+) strand; PAM type: YTN; PAM sequence: TTT
  source 1..20: mol_type = other DNA
gatttcatttagcattgatc

SEQ ID NO: 14562 - DNA, 20 bp, synthetic construct
  misc_feature 1..20: note = Description of Artificial Sequence: Synthetic oligonucleotide
  misc_feature 1..20: note = Target: ANGPTL3; (+) strand; PAM type: YTN; PAM sequence: TTG
  source 1..20: mol_type = other DNA
atttcatttagcattgatct

SEQ ID NO: 14563 - DNA, 20 bp, synthetic construct
  misc_feature 1..20: note = Description of Artificial Sequence: Synthetic oligonucleotide
  misc_feature 1..20: note = Target: ANGPTL3; (+) strand; PAM type: YTN; PAM sequence: TTT
  source 1..20: mol_type = other DNA
catttagcattgatctaact

SEQ ID NO: 14564 - DNA, 20 bp, synthetic construct
  misc_feature 1..20: note = Description of Artificial Sequence: Synthetic oligonucleotide
  misc_feature 1..20: note = Target: ANGPTL3; (+) strand; PAM type: YTN; PAM sequence: TTC
  source 1..20: mol_type = other DNA
atttagcattgatctaactc

SEQ ID NO: 14565 - DNA, 20 bp, synthetic construct
  misc_feature 1..20: note = Description of Artificial Sequence: Synthetic oligonucleotide
  misc_feature 1..20: note = Target: ANGPTL3; (+) strand; PAM type: YTN; PAM sequence: TTT
  source 1..20: mol_type = other DNA
agcattgatctaactcaatg

SEQ ID NO: 14566 - DNA, 20 bp, synthetic construct
  misc_feature 1..20: note = Description of Artificial Sequence: Synthetic oligonucleotide
  misc_feature 1..20: note = Target: ANGPTL3; (+) strand; PAM type: YTN; PAM sequence: TTA
  source 1..20: mol_type = other DNA
gcattgatctaactcaatgt

SEQ ID NO: 14567 - DNA, 20 bp, synthetic construct
  misc_feature 1..20: note = Description of Artificial Sequence: Synthetic oligonucleotide
  misc_feature 1..20: note = Target: ANGPTL3; (+) strand; PAM type: YTN; PAM sequence: TTG
  source 1..20: mol_type = other DNA
atctaactcaatgtggaaga

SEQ ID NO: 14568 - DNA, 20 bp, synthetic construct
  misc_feature 1..20: note = Description of Artificial Sequence: Synthetic oligonucleotide
  misc_feature 1..20: note = Target: ANGPTL3; (+) strand; PAM type: YTN; PAM sequence: CTA
  source 1..20: mol_type = other DNA
actcaatgtggaagaaggtt

SEQ ID NO: 14569 - DNA, 20 bp, synthetic construct
  misc_feature 1..20: note = Description of Artificial Sequence: Synthetic oligonucleotide
  misc_feature 1..20: note = Target: ANGPTL3; (+) strand; PAM type: YTN; PAM sequence: CTC
  source 1..20: mol_type = other DNA
aatgtggaagaaggttacat

SEQ ID NO: 14570 - DNA, 20 bp, synthetic construct
  misc_feature 1..20: note = Description of Artificial Sequence: Synthetic oligonucleotide
  misc_feature 1..20: note = Target: ANGPTL3; (+) strand; PAM type: YTN; PAM sequence: TTA
  source 1..20: mol_type = other DNA
cattcgtgcaagttaacacg

SEQ ID NO: 14571 - DNA, 20 bp, synthetic construct
  misc_feature 1..20: note = Description of Artificial Sequence: Synthetic oligonucleotide
  misc_feature 1..20: note = Target: ANGPTL3; (+) strand; PAM type: YTN; PAM sequence: TTC
  source 1..20: mol_type = other DNA
gtgcaagttaacacggctta

SEQ ID NO: 14572 - DNA, 20 bp, synthetic construct
  misc_feature 1..20: note = Description of Artificial Sequence: Synthetic oligonucleotide
  misc_feature 1..20: note = Target: ANGPTL3; (+) strand; PAM type: YTN; PAM sequence: TTA
  source 1..20: mol_type = other DNA
acacggcttaatgattaact

SEQ ID NO: 14573 - DNA, 20 bp, synthetic construct
  misc_feature 1..20: note = Description of Artificial Sequence: Synthetic oligonucleotide
  misc_feature 1..20: note = Target: ANGPTL3; (+) strand; PAM type: YTN; PAM sequence: CTT
  source 1..20: mol_type = other DNA
aatgattaactatgttcacc

SEQ ID NO: 14574 - DNA, 20 bp, synthetic construct
  misc_feature 1..20: note = Description of Artificial Sequence: Synthetic oligonucleotide
  misc_feature 1..20: note = Target: ANGPTL3; (+) strand; PAM type: YTN; PAM sequence: TTA
  source 1..20: mol_type = other DNA
atgattaactatgttcacct

SEQ ID NO: 14575 - DNA, 20 bp, synthetic construct
  misc_feature 1..20: note = Description of Artificial Sequence: Synthetic oligonucleotide
  misc_feature 1..20: note = Target: ANGPTL3; (+) strand; PAM type: YTN; PAM sequence: TTA
  source 1..20: mol_type = other DNA
actatgttcacctaccaacc

SEQ ID NO: 14576 - DNA, 20 bp, synthetic construct
  misc_feature 1..20: note = Description of Artificial Sequence: Synthetic oligonucleotide
  misc_feature 1..20: note = Target: ANGPTL3; (+) strand; PAM type: YTN; PAM sequence: CTA
  source 1..20: mol_type = other DNA
tgttcacctaccaaccttac

SEQ ID NO: 14577 - DNA, 20 bp, synthetic construct
  misc_feature 1..20: note = Description of Artificial Sequence: Synthetic oligonucleotide
  misc_feature 1..20: note = Target: ANGPTL3; (+) strand; PAM type: YTN; PAM sequence: TTC
  source 1..20: mol_type = other DNA
acctaccaaccttacctttt

SEQ ID NO: 14578 - DNA, 20 bp, synthetic construct
  misc_feature 1..20: note = Description of Artificial Sequence: Synthetic oligonucleotide
  misc_feature 1..20: note = Target: ANGPTL3; (+) strand; PAM type: YTN; PAM sequence: CTA
  source 1..20: mol_type = other DNA
ccaaccttaccttttctggg

SEQ ID NO: 14579 - DNA, 20 bp, synthetic construct
  misc_feature 1..20: note = Description of Artificial Sequence: Synthetic oligonucleotide
  misc_feature 1..20: note = Target: ANGPTL3; (+) strand; PAM type: YTN; PAM sequence: CTT
  source 1..20: mol_type = other DNA
accttttctgggcaaatatt

SEQ ID NO: 14580 - DNA, 20 bp, synthetic construct
  misc_feature 1..20: note = Description of Artificial Sequence: Synthetic oligonucleotide
  misc_feature 1..20: note = Target: ANGPTL3; (+) strand; PAM type: YTN; PAM sequence: TTA
  source 1..20: mol_type = other DNA
ccttttctgggcaaatattg

SEQ ID NO: 14581 - DNA, 20 bp, synthetic construct
  misc_feature 1..20: note = Description of Artificial Sequence: Synthetic oligonucleotide
  misc_feature 1..20: note = Target: ANGPTL3; (+) strand; PAM type: YTN; PAM sequence: CTT
  source 1..20: mol_type = other DNA
ttctgggcaaatattggtat

SEQ ID NO: 14582 - DNA, 20 bp, synthetic construct
  misc_feature 1..20: note = Description of Artificial Sequence: Synthetic oligonucleotide
  misc_feature 1..20: note = Target: ANGPTL3; (+) strand; PAM type: YTN; PAM sequence: TTT
  source 1..20: mol_type = other DNA
tctgggcaaatattggtata

SEQ ID NO: 14583 - DNA, 20 bp, synthetic construct
  misc_feature 1..20: note = Description of Artificial Sequence: Synthetic oligonucleotide
  misc_feature 1..20: note = Target: ANGPTL3; (+) strand; PAM type: YTN; PAM sequence: TTT
  source 1..20: mol_type = other DNA
ctgggcaaatattggtatat

SEQ ID NO: 14584 - DNA, 20 bp, synthetic construct
  misc_feature 1..20: note = Description of Artificial Sequence: Synthetic oligonucleotide
  misc_feature 1..20: note = Target: ANGPTL3; (+) strand; PAM type: YTN; PAM sequence: TTC
  source 1..20: mol_type = other DNA
tgggcaaatattggtatata

SEQ ID NO: 14585 - DNA, 20 bp, synthetic construct
  misc_feature 1..20: note = Description of Artificial Sequence: Synthetic oligonucleotide
  misc_feature 1..20: note = Target: ANGPTL3; (+) strand; PAM type: YTN; PAM sequence: CTG
  source 1..20: mol_type = other DNA
ggcaaatattggtatatata

SEQ ID NO: 14586 - DNA, 20 bp, synthetic construct
  misc_feature 1..20: note = Description of Artificial Sequence: Synthetic oligonucleotide
  misc_feature 1..20: note = Target: ANGPTL3; (+) strand; PAM type: YTN; PAM sequence: TTG
  source 1..20: mol_type = other DNA
gtatatatagagttaagaag

SEQ ID NO: 14587 - DNA, 20 bp, synthetic construct
  misc_feature 1..20: note = Description of Artificial Sequence: Synthetic oligonucleotide
  misc_feature 1..20: note = Target: ANGPTL3; (+) strand; PAM type: YTN; PAM sequence: TTA
  source 1..20: mol_type = other DNA
agaagtctaggtctgcttcc

SEQ ID NO: 14588 - DNA, 20 bp, synthetic construct
  misc_feature 1..20: note = Description of Artificial Sequence: Synthetic oligonucleotide
  misc_feature 1..20: note = Target: ANGPTL3; (+) strand; PAM type: YTN; PAM sequence: CTA
  source 1..20: mol_type = other DNA
ggtctgcttccagaagaaaa

SEQ ID NO: 14589 - DNA, 20 bp, synthetic construct
  misc_feature 1..20: note = Description of Artificial Sequence: Synthetic oligonucleotide
  misc_feature 1..20: note = Target: ANGPTL3; (+) strand; PAM type: YTN; PAM sequence: CTG
  source 1..20: mol_type = other DNA
cttccagaagaaaacagttc

SEQ ID NO: 14590 - DNA, 20 bp, synthetic construct
  misc_feature 1..20: note = Description of Artificial Sequence: Synthetic oligonucleotide
  misc_feature 1..20: note = Target: ANGPTL3; (+) strand; PAM type: YTN; PAM sequence: CTT
  source 1..20: mol_type = other DNA
ccagaagaaaacagttccac

SEQ ID NO: 14591 - DNA, 20 bp, synthetic construct
  misc_feature 1..20: note = Description of Artificial Sequence: Synthetic oligonucleotide
  misc_feature 1..20: note = Target: ANGPTL3; (+) strand; PAM type: YTN; PAM sequence: TTC
  source 1..20: mol_type = other DNA
cagaagaaaacagttccacg

SEQ ID NO: 14592 - DNA, 20 bp, synthetic construct
  misc_feature 1..20: note = Description of Artificial Sequence: Synthetic oligonucleotide
  misc_feature 1..20: note = Target: ANGPTL3; (+) strand; PAM type: YTN; PAM sequence: TTC
  source 1..20: mol_type = other DNA
cacgttgcttgaaattgaaa

SEQ ID NO: 14593 - DNA, 20 bp, synthetic construct
  misc_feature 1..20: note = Description of Artificial Sequence: Synthetic oligonucleotide
  misc_feature 1..20: note = Target: ANGPTL3; (+) strand; PAM type: YTN; PAM sequence: TTG
  source 1..20: mol_type = other DNA
cttgaaattgaaaatcaaga

SEQ ID NO: 14594 - DNA, 20 bp, synthetic construct
  misc_feature 1..20: note = Description of Artificial Sequence: Synthetic oligonucleotide
  misc_feature 1..20: note = Target: ANGPTL3; (+) strand; PAM type: YTN; PAM sequence: CTT
  source 1..20: mol_type = other DNA
gaaattgaaaatcaagataa

SEQ ID NO: 14595 - DNA, 20 bp, synthetic construct
  misc_feature 1..20: note = Description of Artificial Sequence: Synthetic oligonucleotide
  misc_feature 1..20: note = Target: ANGPTL3; (+) strand; PAM type: YTN; PAM sequence: TTG
  source 1..20: mol_type = other DNA
aaattgaaaatcaagataaa

SEQ ID NO: 14596 - DNA, 20 bp, synthetic construct
  misc_feature 1..20: note = Description of Artificial Sequence: Synthetic oligonucleotide
  misc_feature 1..20: note = Target: ANGPTL3; (+) strand; PAM type: YTN; PAM sequence: TTG
  source 1..20: mol_type = other DNA
aaaatcaagataaaaatgtt

SEQ ID NO: 14597 - DNA, 20 bp, synthetic construct
  misc_feature 1..20: note = Description of Artificial Sequence: Synthetic oligonucleotide
  misc_feature 1..20: note = Target: ANGPTL3; (+) strand; PAM type: YTN; PAM sequence: TTC
  source 1..20: mol_type = other DNA
acaattaagctccttctttt

SEQ ID NO: 14598 - DNA, 20 bp, synthetic construct
  misc_feature 1..20: note = Description of Artificial Sequence: Synthetic oligonucleotide
  misc_feature 1..20: note = Target: ANGPTL3; (+) strand; PAM type: YTN; PAM sequence: TTA
  source 1..20: mol_type = other DNA
agctccttctttttattgtt

SEQ ID NO: 14599 - DNA, 20 bp, synthetic construct
  misc_feature 1..20: note = Description of Artificial Sequence: Synthetic oligonucleotide
  misc_feature 1..20: note = Target: ANGPTL3; (+) strand; PAM type: YTN; PAM sequence: CTC
  source 1..20: mol_type = other DNA
cttctttttattgttcctct

SEQ ID NO: 14600 - DNA, 20 bp, synthetic construct
  misc_feature 1..20: note = Description of Artificial Sequence: Synthetic oligonucleotide
  misc_feature 1..20: note = Target: ANGPTL3; (+) strand; PAM type: YTN; PAM sequence: CTT
  source 1..20: mol_type = other DNA
ctttttattgttcctctagt

SEQ ID NO: 14601 - DNA, 20 bp, synthetic construct
  misc_feature 1..20: note = Description of Artificial Sequence: Synthetic oligonucleotide
  misc_feature 1..20: note = Target: ANGPTL3; (+) strand; PAM type: YTN; PAM sequence: TTC
  source 1..20: mol_type = other DNA
tttttattgttcctctagtt

SEQ ID NO: 14602 - DNA, 20 bp, synthetic construct
  misc_feature 1..20: note = Description of Artificial Sequence: Synthetic oligonucleotide
  misc_feature 1..20: note = Target: ANGPTL3; (+) strand; PAM type: YTN; PAM sequence: CTT
  source 1..20: mol_type = other DNA
tttattgttcctctagttat

SEQ ID NO: 14603 - DNA, 20 bp, synthetic construct
  misc_feature 1..20: note = Description of Artificial Sequence: Synthetic oligonucleotide
  misc_feature 1..20: note = Target: ANGPTL3; (+) strand; PAM type: YTN; PAM sequence: TTT
  source 1..20: mol_type = other DNA
ttattgttcctctagttatt

SEQ ID NO: 14604 - DNA, 20 bp, synthetic construct
  misc_feature 1..20: note = Description of Artificial Sequence: Synthetic oligonucleotide
  misc_feature 1..20: note = Target: ANGPTL3; (+) strand; PAM type: YTN; PAM sequence: TTT
  source 1..20: mol_type = other DNA
tattgttcctctagttattt

SEQ ID NO: 14605 - DNA, 20 bp, synthetic construct
  misc_feature 1..20: note = Description of Artificial Sequence: Synthetic oligonucleotide
  misc_feature 1..20: note = Target: ANGPTL3; (+) strand; PAM type: YTN; PAM sequence: TTT
  source 1..20: mol_type = other DNA
attgttcctctagttatttc

SEQ ID NO: 14606 - DNA, 20 bp, synthetic construct
  misc_feature 1..20: note = Description of Artificial Sequence: Synthetic oligonucleotide
  misc_feature 1..20: note = Target: ANGPTL3; (+) strand; PAM type: YTN; PAM sequence: TTA
  source 1..20: mol_type = other DNA
ttgttcctctagttatttcc

SEQ ID NO: 14607 - DNA, 20 bp, synthetic construct
  misc_feature 1..20: note = Description of Artificial Sequence: Synthetic oligonucleotide
  misc_feature 1..20: note = Target: ANGPTL3; (+) strand; PAM type: YTN; PAM sequence: TTG
  source 1..20: mol_type = other DNA
ttcctctagttatttcctcc

SEQ ID NO: 14608 - DNA, 20 bp, synthetic construct
  misc_feature 1..20: note = Description of Artificial Sequence: Synthetic oligonucleotide
  misc_feature 1..20: note = Target: ANGPTL3; (+) strand; PAM type: YTN; PAM sequence: TTC
  source 1..20: mol_type = other DNA
ctctagttatttcctccaga

SEQ ID NO: 14609 - DNA, 20 bp, synthetic construct
  misc_feature 1..20: note = Description of Artificial Sequence: Synthetic oligonucleotide
  misc_feature 1..20: note = Target: ANGPTL3; (+) strand; PAM type: YTN; PAM sequence: CTC
  source 1..20: mol_type = other DNA
tagttatttcctccagaatt

SEQ ID NO: 14610 - DNA, 20 bp, synthetic construct
  misc_feature 1..20: note = Description of Artificial Sequence: Synthetic oligonucleotide
  misc_feature 1..20: note = Target: ANGPTL3; (+) strand; PAM type: YTN; PAM sequence: CTA
  source 1..20: mol_type = other DNA
gttatttcctccagaattga

SEQ ID NO: 14611 - DNA, 20 bp, synthetic construct
  misc_feature 1..20: note = Description of Artificial Sequence: Synthetic oligonucleotide
  misc_feature 1..20: note = Target: ANGPTL3; (+) strand; PAM type: YTN; PAM sequence: TTA
  source 1..20: mol_type = other DNA
tttcctccagaattgatcaa

SEQ ID NO: 14612 - DNA, 20 bp, synthetic construct
  misc_feature 1..20: note = Description of Artificial Sequence: Synthetic oligonucleotide
  misc_feature 1..20: note = Target: ANGPTL3; (+) strand; PAM type: YTN; PAM sequence: TTT
  source 1..20: mol_type = other DNA
cctccagaattgatcaagac

SEQ ID NO: 14613 - DNA, 20 bp, synthetic construct
  misc_feature 1..20: note = Description of Artificial Sequence: Synthetic oligonucleotide
  misc_feature 1..20: note = Target: ANGPTL3; (+) strand; PAM type: YTN; PAM sequence: TTC
  source 1..20: mol_type = other DNA
ctccagaattgatcaagaca

SEQ ID NO: 14614 - DNA, 20 bp, synthetic construct
  misc_feature 1..20: note = Description of Artificial Sequence: Synthetic oligonucleotide
  misc_feature 1..20: note = Target: ANGPTL3; (+) strand; PAM type: YTN; PAM sequence: CTC
  source 1..20: mol_type = other DNA
cagaattgatcaagacaatt

SEQ ID NO: 14615 - DNA, 20 bp, synthetic construct
  misc_feature 1..20: note = Description of Artificial Sequence: Synthetic oligonucleotide
  misc_feature 1..20: note = Target: ANGPTL3; (+) strand; PAM type: YTN; PAM sequence: TTG
  source 1..20: mol_type = other DNA
atcaagacaattcatcattt

SEQ ID NO: 14616 - DNA, 20 bp, synthetic construct
  misc_feature 1..20: note = Description of Artificial Sequence: Synthetic oligonucleotide
  misc_feature 1..20: note = Target: ANGPTL3; (+) strand; PAM type: YTN; PAM sequence: TTC
  source 1..20: mol_type = other DNA
atcatttgattctctatctc

SEQ ID NO: 14617 - DNA, 20 bp, synthetic construct
  misc_feature 1..20: note = Description of Artificial Sequence: Synthetic oligonucleotide
  misc_feature 1..20: note = Target: ANGPTL3; (+) strand; PAM type: YTN; PAM sequence: TTT
  source 1..20: mol_type = other DNA
gattctctatctccagagcc

SEQ ID NO: 14618 - DNA, 20 bp, synthetic construct
  misc_feature 1..20: note = Description of Artificial Sequence: Synthetic oligonucleotide
  misc_feature 1..20: note = Target: ANGPTL3; (+) strand; PAM type: YTN; PAM sequence: TTG
  source 1..20: mol_type = other DNA
attctctatctccagagcca

SEQ ID NO: 14619 - DNA, 20 bp, synthetic construct
  misc_feature 1..20: note = Description of Artificial Sequence: Synthetic oligonucleotide
  misc_feature 1..20: note = Target: ANGPTL3; (+) strand; PAM type: YTN; PAM sequence: TTC
  source 1..20: mol_type = other DNA
tctatctccagagccaaaat

SEQ ID NO: 14620 - DNA, 20 bp, synthetic construct
  misc_feature 1..20: note = Description of Artificial Sequence: Synthetic oligonucleotide
  misc_feature 1..20: note = Target: ANGPTL3; (+) strand; PAM type: YTN; PAM sequence: CTC
  source 1..20: mol_type = other DNA
tatctccagagccaaaatca

SEQ ID NO: 14621 - DNA, 20 bp, synthetic construct
  misc_feature 1..20: note = Description of Artificial Sequence: Synthetic oligonucleotide
  misc_feature 1..20: note = Target: ANGPTL3; (+) strand; PAM type: YTN; PAM sequence: CTA
  source 1..20: mol_type = other DNA
tctccagagccaaaatcaag

SEQ ID NO: 14622 - DNA, 20 bp, synthetic construct
  misc_feature 1..20: note = Description of Artificial Sequence: Synthetic oligonucleotide
  misc_feature 1..20: note = Target: ANGPTL3; (+) strand; PAM type: YTN; PAM sequence: CTC
  source 1..20: mol_type = other DNA
cagagccaaaatcaagattt

SEQ ID NO: 14623 - DNA, 20 bp, synthetic construct
  misc_feature 1..20: note = Description of Artificial Sequence: Synthetic oligonucleotide
  misc_feature 1..20: note = Target: ANGPTL3; (+) strand; PAM type: YTN; PAM sequence: TTT
  source 1..20: mol_type = other DNA
gctatgttagacgatgtaaa

SEQ ID NO: 14624 - DNA, 20 bp, synthetic construct
  misc_feature 1..20: note = Description of Artificial Sequence: Synthetic oligonucleotide
  misc_feature 1..20: note = Target: ANGPTL3; (+) strand; PAM type: YTN; PAM sequence: TTG
  source 1..20: mol_type = other DNA
ctatgttagacgatgtaaaa

SEQ ID NO: 14625 - DNA, 20 bp, synthetic construct
  misc_feature 1..20: note = Description of Artificial Sequence: Synthetic oligonucleotide
  misc_feature 1..20: note = Target: ANGPTL3; (+) strand; PAM type: YTN; PAM sequence: CTA
  source 1..20: mol_type = other DNA
tgttagacgatgtaaaaatt

SEQ ID NO: 14626 - DNA, 20 bp, synthetic construct
  misc_feature 1..20: note = Description of Artificial Sequence: Synthetic oligonucleotide
  misc_feature 1..20: note = Target: ANGPTL3; (+) strand; PAM type: YTN; PAM sequence: TTA
  source 1..20: mol_type = other DNA
gacgatgtaaaaattttagc

SEQ ID NO: 14627 - DNA, 20 bp, synthetic construct
  misc_feature 1..20: note = Description of Artificial Sequence: Synthetic oligonucleotide
  misc_feature 1..20: note = Target: ANGPTL3; (+) strand; PAM type: YTN; PAM sequence: TTT
  source 1..20: mol_type = other DNA
tagccaatggcctccttcag

SEQ ID NO: 14628 - DNA, 20 bp, synthetic construct
  misc_feature 1..20: note = Description of Artificial Sequence: Synthetic oligonucleotide
  misc_feature 1..20: note = Target: ANGPTL3; (+) strand; PAM type: YTN; PAM sequence: TTT
  source 1..20: mol_type = other DNA
agccaatggcctccttcagt

SEQ ID NO: 14629 - DNA, 20 bp, synthetic construct
  misc_feature 1..20: note = Description of Artificial Sequence: Synthetic oligonucleotide
  misc_feature 1..20: note = Target: ANGPTL3; (+) strand; PAM type: YTN; PAM sequence: TTA
  source 1..20: mol_type = other DNA
gccaatggcctccttcagtt

SEQ ID NO: 14630 - DNA, 20 bp, synthetic construct
  misc_feature 1..20: note = Description of Artificial Sequence: Synthetic oligonucleotide
  misc_feature 1..20: note = Target: ANGPTL3; (+) strand; PAM type: YTN; PAM sequence: CTC
  source 1..20: mol_type = other DNA
cttcagttgggacatggtct

SEQ ID NO: 14631 - DNA, 20 bp, synthetic construct
  misc_feature 1..20: note = Description of Artificial Sequence: Synthetic oligonucleotide
  misc_feature 1..20: note = Target: ANGPTL3; (+) strand; PAM type: YTN; PAM sequence: CTT
  source 1..20: mol_type = other DNA
cagttgggacatggtcttaa

SEQ ID NO: 14632 - DNA, 20 bp, synthetic construct
  misc_feature 1..20: note = Description of Artificial Sequence: Synthetic oligonucleotide
  misc_feature 1..20: note = Target: ANGPTL3; (+) strand; PAM type: YTN; PAM sequence: TTC
  source 1..20: mol_type = other DNA
agttgggacatggtcttaaa

SEQ ID NO: 14633 - DNA, 20 bp, synthetic construct
  misc_feature 1..20: note = Description of Artificial Sequence: Synthetic oligonucleotide
  misc_feature 1..20: note = Target: ANGPTL3; (+) strand; PAM type: YTN; PAM sequence: TTG
  source 1..20: mol_type = other DNA
ggacatggtcttaaagactt

SEQ ID NO: 14634 - DNA, 20 bp, synthetic construct
  misc_feature 1..20: note = Description of Artificial Sequence: Synthetic oligonucleotide
  misc_feature 1..20: note = Target: ANGPTL3; (+) strand; PAM type: YTN; PAM sequence: CTT
  source 1..20: mol_type = other DNA
aaagactttgtccataagac

SEQ ID NO: 14635 - DNA, 20 bp, synthetic construct
  misc_feature 1..20: note = Description of Artificial Sequence: Synthetic oligonucleotide
  misc_feature 1..20: note = Target: ANGPTL3; (+) strand; PAM type: YTN; PAM sequence: TTA
  source 1..20: mol_type = other DNA
aagactttgtccataagacg

SEQ ID NO: 14636 - DNA, 20 bp, synthetic construct
  misc_feature 1..20: note = Description of Artificial Sequence: Synthetic oligonucleotide
  misc_feature 1..20: note = Target: ANGPTL3; (+) strand; PAM type: YTN; PAM sequence: CTT
  source 1..20: mol_type = other DNA
tgtccataagacgaagggcc

SEQ ID NO: 14637 - DNA, 20 bp, synthetic construct
  misc_feature 1..20: note = Description of Artificial Sequence: Synthetic oligonucleotide
  misc_feature 1..20: note = Target: ANGPTL3; (+) strand; PAM type: YTN; PAM sequence: TTT
  source 1..20: mol_type = other DNA
gtccataagacgaagggcca

SEQ ID NO: 14638 - DNA, 20 bp, synthetic construct
  misc_feature 1..20: note = Description of Artificial Sequence: Synthetic oligonucleotide
  misc_feature 1..20: note = Target: ANGPTL3; (+) strand; PAM type: YTN; PAM sequence: TTG
  source 1..20: mol_type = other DNA
tccataagacgaagggccaa

SEQ ID NO: 14639 - DNA, 20 bp, synthetic construct
  misc_feature 1..20: note = Description of Artificial Sequence: Synthetic oligonucleotide
  misc_feature 1..20: note = Target: ANGPTL3; (+) strand; PAM type: YTN; PAM sequence: TTA
  source 1..20: mol_type = other DNA
atgacatatttcaaaaactc

SEQ ID NO: 14640 - DNA, 20 bp, synthetic construct
  misc_feature 1..20: note = Description of Artificial Sequence: Synthetic oligonucleotide
  misc_feature 1..20: note = Target: ANGPTL3; (+) strand; PAM type: YTN; PAM sequence: TTT
  source 1..20: mol_type = other DNA
caaaaactcaacatatttga

SEQ ID NO: 14641 - DNA, 20 bp, synthetic construct
  misc_feature 1..20: note = Description of Artificial Sequence: Synthetic oligonucleotide
  misc_feature 1..20: note = Target: ANGPTL3; (+) strand; PAM type: YTN; PAM sequence: TTC
  source 1..20: mol_type = other DNA
aaaaactcaacatatttgat

SEQ ID NO: 14642 - DNA, 20 bp, synthetic construct
  misc_feature 1..20: note = Description of Artificial Sequence: Synthetic oligonucleotide
  misc_feature 1..20: note = Target: ANGPTL3; (+) strand; PAM type: YTN; PAM sequence: CTC
  source 1..20: mol_type = other DNA
aacatatttgatcagtcttt

SEQ ID NO: 14643 - DNA, 20 bp, synthetic construct
  misc_feature 1..20: note = Description of Artificial Sequence: Synthetic oligonucleotide
  misc_feature 1..20: note = Target: ANGPTL3; (+) strand; PAM type: YTN; PAM sequence: TTT
  source 1..20: mol_type = other DNA
gatcagtctttttatgatct

SEQ ID NO: 14644 - DNA, 20 bp, synthetic construct
  misc_feature 1..20: note = Description of Artificial Sequence: Synthetic oligonucleotide
  misc_feature 1..20: note = Target: ANGPTL3; (+) strand; PAM type: YTN; PAM sequence: TTG
  source 1..20: mol_type = other DNA
atcagtctttttatgatcta

SEQ ID NO: 14645 - DNA, 20 bp, synthetic construct
  misc_feature 1..20: note = Description of Artificial Sequence: Synthetic oligonucleotide
  misc_feature 1..20: note = Target: ANGPTL3; (+) strand; PAM type: YTN; PAM sequence: CTT
  source 1..20: mol_type = other DNA
tttatgatctatcgctgcaa

SEQ ID NO: 14646 - DNA, 20 bp, synthetic construct
  misc_feature 1..20: note = Description of Artificial Sequence: Synthetic oligonucleotide
  misc_feature 1..20: note = Target: ANGPTL3; (+) strand; PAM type: YTN; PAM sequence: TTT
  source 1..20: mol_type = other DNA
ttatgatctatcgctgcaaa

SEQ ID NO: 14647 - DNA, 20 bp, synthetic construct
  misc_feature 1..20: note = Description of Artificial Sequence: Synthetic oligonucleotide
  misc_feature 1..20: note = Target: ANGPTL3; (+) strand; PAM type: YTN; PAM sequence: TTT
  source 1..20: mol_type = other DNA
tatgatctatcgctgcaaac

SEQ ID NO: 14648 - DNA, 20 bp, synthetic construct
  misc_feature 1..20: note = Description of Artificial Sequence: Synthetic oligonucleotide
  misc_feature 1..20: note = Target: ANGPTL3; (+) strand; PAM type: YTN; PAM sequence: TTT
  source 1..20: mol_type = other DNA
atgatctatcgctgcaaacc

SEQ ID NO: 14649 - DNA, 20 bp, synthetic construct
  misc_feature 1..20: note = Description of Artificial Sequence: Synthetic oligonucleotide
  misc_feature 1..20: note = Target: ANGPTL3; (+) strand; PAM type: YTN; PAM sequence: TTA
  source 1..20: mol_type = other DNA
tgatctatcgctgcaaacca

SEQ ID NO: 14650 - DNA, 20 bp, synthetic construct
  misc_feature 1..20: note = Description of Artificial Sequence: Synthetic oligonucleotide
  misc_feature 1..20: note = Target: ANGPTL3; (+) strand; PAM type: YTN; PAM sequence: CTA
  source 1..20: mol_type = other DNA
tcgctgcaaaccagtgaaat

SEQ ID NO: 14651 - DNA, 20 bp, synthetic construct
  misc_feature 1..20: note = Description of Artificial Sequence: Synthetic oligonucleotide
  misc_feature 1..20: note = Target: ANGPTL3; (+) strand; PAM type: YTN; PAM sequence: CTG
  source 1..20: mol_type = other DNA
caaaccagtgaaatcaaaga

SEQ ID NO: 14652 - DNA, 20 bp, synthetic construct
  misc_feature 1..20: note = Description of Artificial Sequence: Synthetic oligonucleotide
  misc_feature 1..20: note = Target: ANGPTL3; (+) strand; PAM type: YTN; PAM sequence: CTG
  source 1..20: mol_type = other DNA
agaagaactacatataaact

SEQ ID NO: 14653 - DNA, 20 bp, synthetic construct
  misc_feature 1..20: note = Description of Artificial Sequence: Synthetic oligonucleotide
  misc_feature 1..20: note = Target: ANGPTL3; (+) strand; PAM type: YTN; PAM sequence: CTA
  source 1..20: mol_type = other DNA
catataaactacaagtcaaa

SEQ ID NO: 14654 - DNA, 20 bp, synthetic construct
  misc_feature 1..20: note = Description of Artificial Sequence: Synthetic oligonucleotide
  misc_feature 1..20: note = Target: ANGPTL3; (+) strand; PAM type: YTN; PAM sequence: CTA
  source 1..20: mol_type = other DNA
caagtcaaaaatgaagaggt

SEQ ID NO: 14655 - DNA, 20 bp, synthetic construct
  misc_feature 1..20: note = Description of Artificial Sequence: Synthetic oligonucleotide
  misc_feature 1..20: note = Target: ANGPTL3; (+) strand; PAM type: YTN; PAM sequence: CTT
  source 1..20: mol_type = other DNA
gaactcaactcaaaacttga

SEQ ID NO: 14656 - DNA, 20 bp, synthetic construct
  misc_feature 1..20: note = Description of Artificial Sequence: Synthetic oligonucleotide
  misc_feature 1..20: note = Target: ANGPTL3; (+) strand; PAM type: YTN; PAM sequence: TTG
  source 1..20: mol_type = other DNA
aactcaactcaaaacttgaa

SEQ ID NO: 14657 - DNA, 20 bp, synthetic construct
  misc_feature 1..20: note = Description of Artificial Sequence: Synthetic oligonucleotide
  misc_feature 1..20: note = Target: ANGPTL3; (+) strand; PAM type: YTN; PAM sequence: CTC
  source 1..20: mol_type = other DNA
aactcaaaacttgaaagcct

SEQ ID NO: 14658 - DNA, 20 bp, synthetic construct
  misc_feature 1..20: note = Description of Artificial Sequence: Synthetic oligonucleotide
  misc_feature 1..20: note = Target: ANGPTL3; (+) strand; PAM type: YTN; PAM sequence: CTC
  source 1..20: mol_type = other DNA
aaaacttgaaagcctcctag

SEQ ID NO: 14659 - DNA, 20 bp, synthetic construct
  misc_feature 1..20: note = Description of Artificial Sequence: Synthetic oligonucleotide
  misc_feature 1..20: note = Target: ANGPTL3; (+) strand; PAM type: YTN; PAM sequence: CTT
  source 1..20: mol_type = other DNA
gaaagcctcctagaagaaaa

SEQ ID NO: 14660 - DNA, 20 bp, synthetic construct
  misc_feature 1..20: note = Description of Artificial Sequence: Synthetic oligonucleotide
  misc_feature 1..20: note = Target: ANGPTL3; (+) strand; PAM type: YTN; PAM sequence: TTG
  source 1..20: mol_type = other DNA
aaagcctcctagaagaaaaa

SEQ ID NO: 14661 - DNA, 20 bp, synthetic construct
  misc_feature 1..20: note = Description of Artificial Sequence: Synthetic oligonucleotide
  misc_feature 1..20: note = Target: ANGPTL3; (+) strand; PAM type: YTN; PAM sequence: CTC
  source 1..20: mol_type = other DNA
ctagaagaaaaaattctact

SEQ ID NO: 14662 - DNA, 20 bp, synthetic construct
  misc_feature 1..20: note = Description of Artificial Sequence: Synthetic oligonucleotide
  misc_feature 1..20: note = Target: ANGPTL3; (+) strand; PAM type: YTN; PAM sequence: CTA
  source 1..20: mol_type = other DNA
gaagaaaaaattctacttca

SEQ ID NO: 14663 - DNA, 20 bp, synthetic construct
  misc_feature 1..20: note = Description of Artificial Sequence: Synthetic oligonucleotide
  misc_feature 1..20: note = Target: ANGPTL3; (+) strand; PAM type: YTN; PAM sequence: TTC
  source 1..20: mol_type = other DNA
tacttcaacaaaaagtgaaa

SEQ ID NO: 14664 - DNA, 20 bp, synthetic construct
  misc_feature 1..20: note = Description of Artificial Sequence: Synthetic oligonucleotide
  misc_feature 1..20: note = Target: ANGPTL3; (+) strand; PAM type: YTN; PAM sequence: CTA
  source 1..20: mol_type = other DNA
cttcaacaaaaagtgaaata

SEQ ID NO: 14665 - DNA, 20 bp, synthetic construct
  misc_feature 1..20: note = Description of Artificial Sequence: Synthetic oligonucleotide
  misc_feature 1..20: note = Target: ANGPTL3; (+) strand; PAM type: YTN; PAM sequence: CTT
  source 1..20: mol_type = other DNA
caacaaaaagtgaaatattt

SEQ ID NO: 14666 - DNA, 20 bp, synthetic construct
  misc_feature 1..20: note = Description of Artificial Sequence: Synthetic oligonucleotide
  misc_feature 1..20: note = Target: ANGPTL3; (+) strand; PAM type: YTN; PAM sequence: TTC
  source 1..20: mol_type = other DNA
aacaaaaagtgaaatattta

SEQ ID NO: 14667 - DNA, 20 bp, synthetic construct
  misc_feature 1..20: note = Description of Artificial Sequence: Synthetic oligonucleotide
  misc_feature 1..20: note = Target: ANGPTL3; (+) strand; PAM type: YTN; PAM sequence: TTT
  source 1..20: mol_type = other DNA
agaagagcaactaactaact

SEQ ID NO: 14668 - DNA, 20 bp, synthetic construct
  misc_feature 1..20: note = Description of Artificial Sequence: Synthetic oligonucleotide
  misc_feature 1..20: note = Target: ANGPTL3; (+) strand; PAM type: YTN; PAM sequence: TTA
  source 1..20: mol_type = other DNA
gaagagcaactaactaactt

SEQ ID NO: 14669 - DNA, 20 bp, synthetic construct
  misc_feature 1..20: note = Description of Artificial Sequence: Synthetic oligonucleotide
  misc_feature 1..20: note = Target: ANGPTL3; (+) strand; PAM type: YTN; PAM sequence: CTA
  source 1..20: mol_type = other DNA
actaacttaattcaaaatca

SEQ ID NO: 14670 - DNA, 20 bp, synthetic construct
  misc_feature 1..20: note = Description of Artificial Sequence: Synthetic oligonucleotide
  misc_feature 1..20: note = Target: ANGPTL3; (+) strand; PAM type: YTN; PAM sequence: CTA
  source 1..20: mol_type = other DNA
acttaattcaaaatcaacct

SEQ ID NO: 14671 - DNA, 20 bp, synthetic construct
  misc_feature 1..20: note = Description of Artificial Sequence: Synthetic oligonucleotide
  misc_feature 1..20: note = Target: ANGPTL3; (+) strand; PAM type: YTN; PAM sequence: CTT
  source 1..20: mol_type = other DNA
aattcaaaatcaacctgaaa

SEQ ID NO: 14672 - DNA, 20 bp, synthetic construct
  misc_feature 1..20: note = Description of Artificial Sequence: Synthetic oligonucleotide
  misc_feature 1..20: note = Target: ANGPTL3; (+) strand; PAM type: YTN; PAM sequence: TTA
  source 1..20: mol_type = other DNA
attcaaaatcaacctgaaac

SEQ ID NO: 14673 - DNA, 20 bp, synthetic construct
  misc_feature 1..20: note = Description of Artificial Sequence: Synthetic oligonucleotide
  misc_feature 1..20: note = Target: ANGPTL3; (+) strand; PAM type: YTN; PAM sequence: TTC
  source 1..20: mol_type = other DNA
aaaatcaacctgaaactcca

SEQ ID NO: 14674 - DNA, 20 bp, synthetic construct
  misc_feature 1..20: note = Description of Artificial Sequence: Synthetic oligonucleotide
  misc_feature 1..20: note = Target: ANGPTL3; (+) strand; PAM type: YTN; PAM sequence: CTG
  source 1..20: mol_type = other DNA
aaactccagaacacccagaa

SEQ ID NO: 14675 - DNA, 20 bp, synthetic construct
  misc_feature 1..20: note = Description of Artificial Sequence: Synthetic oligonucleotide
  misc_feature 1..20: note = Target: ANGPTL3; (+) strand; PAM type: YTN; PAM sequence: CTC
  source 1..20: mol_type = other DNA
cagaacacccagaagtaact

SEQ ID NO: 14676 - DNA, 20 bp, synthetic construct
  misc_feature 1..20: note = Description of Artificial Sequence: Synthetic oligonucleotide
  misc_feature 1..20: note = Target: ANGPTL3; (+) strand; PAM type: YTN; PAM sequence: CTT
  source 1..20: mol_type = other DNA
cacttaaagtaagtagaaaa

SEQ ID NO: 14677 - DNA, 20 bp, synthetic construct
  misc_feature 1..20: note = Description of Artificial Sequence: Synthetic oligonucleotide
  misc_feature 1..20: note = Target: ANGPTL3; (+) strand; PAM type: YTN; PAM sequence: TTC
  source 1..20: mol_type = other DNA
acttaaagtaagtagaaaat

SEQ ID NO: 14678 - DNA, 20 bp, synthetic construct
  misc_feature 1..20: note = Description of Artificial Sequence: Synthetic oligonucleotide
  misc_feature 1..20: note = Target: ANGPTL3; (+) strand; PAM type: YTN; PAM sequence: CTT
  source 1..20: mol_type = other DNA
aaagtaagtagaaaataaag

SEQ ID NO: 14679 - DNA, 20 bp, synthetic construct
  misc_feature 1..20: note = Description of Artificial Sequence: Synthetic oligonucleotide
  misc_feature 1..20: note = Target: ANGPTL3; (+) strand; PAM type: YTN; PAM sequence: TTA
  source 1..20: mol_type = other DNA
aagtaagtagaaaataaaga

SEQ ID NO: 14680 - DNA, 20 bp, synthetic construct
  misc_feature 1..20: note = Description of Artificial Sequence: Synthetic oligonucleotide
  misc_feature 1..20: note = Target: ANGPTL3; (+) strand; PAM type: YTN; PAM sequence: TTC
  source 1..20: mol_type = other DNA
atgtttatgttttcaatgtg

SEQ ID NO: 14681 - DNA, 20 bp, synthetic construct
  misc_feature 1..20: note = Description of Artificial Sequence: Synthetic oligonucleotide
  misc_feature 1..20: note = Target: ANGPTL3; (+) strand; PAM type: YTN; PAM sequence: TTT
  source 1..20: mol_type = other DNA
atgttttcaatgtggatctt

SEQ ID NO: 14682 - DNA, 20 bp, synthetic construct
  misc_feature 1..20: note = Description of Artificial Sequence: Synthetic oligonucleotide
  misc_feature 1..20: note = Target: ANGPTL3; (+) strand; PAM type: YTN; PAM sequence: TTA
  source 1..20: mol_type = other DNA
tgttttcaatgtggatcttt

SEQ ID NO: 14683 - DNA, 20 bp, synthetic construct
  misc_feature 1..20: note = Description of Artificial Sequence: Synthetic oligonucleotide
  misc_feature 1..20: note = Target: ANGPTL3; (+) strand; PAM type: YTN; PAM sequence: TTT
  source 1..20: mol_type = other DNA
tcaatgtggatcttttaaaa

SEQ ID NO: 14684 - DNA, 20 bp, synthetic construct
  misc_feature 1..20: note = Description of Artificial Sequence: Synthetic oligonucleotide
  misc_feature 1..20: note = Target: ANGPTL3; (+) strand; PAM type: YTN; PAM sequence: TTT
  source 1..20: mol_type = other DNA
caatgtggatcttttaaaaa

SEQ ID NO: 14685 - DNA, 20 bp, synthetic construct
  misc_feature 1..20: note = Description of Artificial Sequence: Synthetic oligonucleotide
  misc_feature 1..20: note = Target: ANGPTL3; (+) strand; PAM type: YTN; PAM sequence: TTC
  source 1..20: mol_type = other DNA
aatgtggatcttttaaaaaa

SEQ ID NO: 14686 - DNA, 20 bp, synthetic construct
  misc_feature 1..20: note = Description of Artificial Sequence: Synthetic oligonucleotide
  misc_feature 1..20: note = Target: ANGPTL3; (+) strand; PAM type: YTN; PAM sequence: CTT
  source 1..20: mol_type = other DNA
ttaaaaaaaatatttctaag

SEQ ID NO: 14687 - DNA, 20 bp, synthetic construct
  misc_feature 1..20: note = Description of Artificial Sequence: Synthetic oligonucleotide
  misc_feature 1..20: note = Target: ANGPTL3; (+) strand; PAM type: YTN; PAM sequence: TTT
  source 1..20: mol_type = other DNA
taaaaaaaatatttctaagg

SEQ ID NO: 14688 - DNA, 20 bp, synthetic construct
  misc_feature 1..20: note = Description of Artificial Sequence: Synthetic oligonucleotide
  misc_feature 1..20: note = Target: ANGPTL3; (+) strand; PAM type: YTN; PAM sequence: TTT
  source 1..20: mol_type = other DNA
aaaaaaaatatttctaaggc

SEQ ID NO: 14689 - DNA, 20 bp, synthetic construct
  misc_feature 1..20: note = Description of Artificial Sequence: Synthetic oligonucleotide
  misc_feature 1..20: note = Target: ANGPTL3; (+) strand; PAM type: YTN; PAM sequence: TTA
  source 1..20: mol_type = other DNA
aaaaaaatatttctaaggca

SEQ ID NO: 14690 - DNA, 20 bp, synthetic construct
  misc_feature 1..20: note = Description of Artificial Sequence: Synthetic oligonucleotide
  misc_feature 1..20: note = Target: ANGPTL3; (+) strand; PAM type: YTN; PAM sequence: TTT
  source 1..20: mol_type = other DNA
ctaaggcatgccatttgaaa

SEQ ID NO: 14691 - DNA, 20 bp, synthetic construct
  misc_feature 1..20: note = Description of Artificial Sequence: Synthetic oligonucleotide
  misc_feature 1..20: note = Target: ANGPTL3; (+) strand; PAM type: YTN; PAM sequence: TTC
  source 1..20: mol_type = other DNA
taaggcatgccatttgaaat

SEQ ID NO: 14692 - DNA, 20 bp, synthetic construct
  misc_feature 1..20: note = Description of Artificial Sequence: Synthetic oligonucleotide
  misc_feature 1..20: note = Target: ANGPTL3; (+) strand; PAM type: YTN; PAM sequence: CTA
  source 1..20: mol_type = other DNA
aggcatgccatttgaaatac

SEQ ID NO: 14693 - DNA, 20 bp, synthetic construct
  misc_feature 1..20: note = Description of Artificial Sequence: Synthetic oligonucleotide
  misc_feature 1..20: note = Target: ANGPTL3; (+) strand; PAM type: YTN; PAM sequence: TTT
  source 1..20: mol_type = other DNA
gaaatactttgttgcattgt

SEQ ID NO: 14694 - DNA, 20 bp, synthetic construct
  misc_feature 1..20: note = Description of Artificial Sequence: Synthetic oligonucleotide
  misc_feature 1..20: note = Target: ANGPTL3; (+) strand; PAM type: YTN; PAM sequence: TTG
  source 1..20: mol_type = other DNA
aaatactttgttgcattgtt

SEQ ID NO: 14695 - DNA, 20 bp, synthetic construct
  misc_feature 1..20: note = Description of Artificial Sequence: Synthetic oligonucleotide
  misc_feature 1..20: note = Target: ANGPTL3; (+) strand; PAM type: YTN; PAM sequence: CTT
  source 1..20: mol_type = other DNA
tgttgcattgttgaaatact

SEQ ID NO: 14696 - DNA, 20 bp, synthetic construct
  misc_feature 1..20: note = Description of Artificial Sequence: Synthetic oligonucleotide
  misc_feature 1..20: note = Target: ANGPTL3; (+) strand; PAM type: YTN; PAM sequence: TTT
  source 1..20: mol_type = other DNA
gttgcattgttgaaatactt

SEQ ID NO: 14697 - DNA, 20 bp, synthetic construct
  misc_feature 1..20: note = Description of Artificial Sequence: Synthetic oligonucleotide
  misc_feature 1..20: note = Target: ANGPTL3; (+) strand; PAM type: YTN; PAM sequence: TTG
  source 1..20: mol_type = other DNA
ttgcattgttgaaatacttt

SEQ ID NO: 14698 - DNA, 20 bp, synthetic construct
  misc_feature 1..20: note = Description of Artificial Sequence: Synthetic oligonucleotide
  misc_feature 1..20: note = Target: ANGPTL3; (+) strand; PAM type: YTN; PAM sequence: TTG
  source 1..20: mol_type = other DNA
cattgttgaaatactttttt

SEQ ID NO: 14699 - DNA, 20 bp, synthetic construct
  misc_feature 1..20: note = Description of Artificial Sequence: Synthetic oligonucleotide
  misc_feature 1..20: note = Target: ANGPTL3; (+) strand; PAM type: YTN; PAM sequence: TTG
  source 1..20: mol_type = other DNA
ttgaaatacttttttttcca

SEQ ID NO: 14700 - DNA, 20 bp, synthetic construct
  misc_feature 1..20: note = Description of Artificial Sequence: Synthetic oligonucleotide
  misc_feature 1..20: note = Target: ANGPTL3; (+) strand; PAM type: YTN; PAM sequence: TTG
  source 1..20: mol_type = other DNA
aaatacttttttttccaaga

SEQ ID NO: 14701 - DNA, 20 bp, synthetic construct
  misc_feature 1..20: note = Description of Artificial Sequence: Synthetic oligonucleotide
  misc_feature 1..20: note = Target: ANGPTL3; (+) strand; PAM type: YTN; PAM sequence: CTT
  source 1..20: mol_type = other DNA
ttttttccaagaaaaataat

SEQ ID NO: 14702 - DNA, 20 bp, synthetic construct
  misc_feature 1..20: note = Description of Artificial Sequence: Synthetic oligonucleotide
  misc_feature 1..20: note = Target: ANGPTL3; (+) strand; PAM type: YTN; PAM sequence: TTT
  source 1..20: mol_type = other DNA
tttttccaagaaaaataatc

SEQ ID NO: 14703 - DNA, 20 bp, synthetic construct
  misc_feature 1..20: note = Description of Artificial Sequence: Synthetic oligonucleotide
  misc_feature 1..20: note = Target: ANGPTL3; (+) strand; PAM type: YTN; PAM sequence: TTT
  source 1..20: mol_type = other DNA
ttttccaagaaaaataatct

SEQ ID NO: 14704 - DNA, 20 bp, synthetic construct
  misc_feature 1..20: note = Description of Artificial Sequence: Synthetic oligonucleotide
  misc_feature 1..20: note = Target: ANGPTL3; (+) strand; PAM type: YTN; PAM sequence: TTT
  source 1..20: mol_type = other DNA
tttccaagaaaaataatctc

SEQ ID NO: 14705 - DNA, 20 bp, synthetic construct
  misc_feature 1..20: note = Description of Artificial Sequence: Synthetic oligonucleotide
  misc_feature 1..20: note = Target: ANGPTL3; (+) strand; PAM type: YTN; PAM sequence: TTT
  source 1..20: mol_type = other DNA
ttccaagaaaaataatctcc

SEQ ID NO: 14706 - DNA, 20 bp, synthetic construct
  misc_feature 1..20: note = Description of Artificial Sequence: Synthetic oligonucleotide
  misc_feature 1..20: note = Target: ANGPTL3; (+) strand; PAM type: YTN; PAM sequence: TTT
  source 1..20: mol_type = other DNA
tccaagaaaaataatctcca

SEQ ID NO: 14707 - DNA, 20 bp, synthetic construct
  misc_feature 1..20: note = Description of Artificial Sequence: Synthetic oligonucleotide
  misc_feature 1..20: note = Target: ANGPTL3; (+) strand; PAM type: YTN; PAM sequence: TTT
  source 1..20: mol_type = other DNA
ccaagaaaaataatctccag

SEQ ID NO: 14708 - DNA, 20 bp, synthetic construct
  misc_feature 1..20: note = Description of Artificial Sequence: Synthetic oligonucleotide
  misc_feature 1..20: note = Target: ANGPTL3; (+) strand; PAM type: YTN; PAM sequence: TTC
  source 1..20: mol_type = other DNA
caagaaaaataatctccaga

SEQ ID NO: 14709 - DNA, 20 bp, synthetic construct
  misc_feature 1..20: note = Description of Artificial Sequence: Synthetic oligonucleotide
  misc_feature 1..20: note = Target: ANGPTL3; (+) strand; PAM type: YTN; PAM sequence: CTC
  source 1..20: mol_type = other DNA
cagaaaataaaatttcctat

SEQ ID NO: 14710 - DNA, 20 bp, synthetic construct
  misc_feature 1..20: note = Description of Artificial Sequence: Synthetic oligonucleotide
  misc_feature 1..20: note = Target: ANGPTL3; (+) strand; PAM type: YTN; PAM sequence: TTT
  source 1..20: mol_type = other DNA
cctattataatttcaagtta

SEQ ID NO: 14711 - DNA, 20 bp, synthetic construct
  misc_feature 1..20: note = Description of Artificial Sequence: Synthetic oligonucleotide
  misc_feature 1..20: note = Target: ANGPTL3; (+) strand; PAM type: YTN; PAM sequence: TTC
  source 1..20: mol_type = other DNA
ctattataatttcaagttag

SEQ ID NO: 14712 - DNA, 20 bp, synthetic construct
  misc_feature 1..20: note = Description of Artificial Sequence: Synthetic oligonucleotide
  misc_feature 1..20: note = Target: ANGPTL3; (+) strand; PAM type: YTN; PAM sequence: CTA
  source 1..20: mol_type = other DNA
ttataatttcaagttagttt

SEQ ID NO: 14713 - DNA, 20 bp, synthetic construct
  misc_feature 1..20: note = Description of Artificial Sequence: Synthetic oligonucleotide
  misc_feature 1..20: note = Target: ANGPTL3; (+) strand; PAM type: YTN; PAM sequence: TTA
  source 1..20: mol_type = other DNA
taatttcaagttagtttttt

SEQ ID NO: 14714 - DNA, 20 bp, synthetic construct
  misc_feature 1..20: note = Description of Artificial Sequence: Synthetic oligonucleotide
  misc_feature 1..20: note = Target: ANGPTL3; (+) strand; PAM type: YTN; PAM sequence: TTT
  source 1..20: mol_type = other DNA
caagttagttttttgtttcc

SEQ ID NO: 14715 - DNA, 20 bp, synthetic construct
  misc_feature 1..20: note = Description of Artificial Sequence: Synthetic oligonucleotide
  misc_feature 1..20: note = Target: ANGPTL3; (+) strand; PAM type: YTN; PAM sequence: TTC
  source 1..20: mol_type = other DNA
aagttagttttttgtttccc

SEQ ID NO: 14716 - DNA, 20 bp, synthetic construct
  misc_feature 1..20: note = Description of Artificial Sequence: Synthetic oligonucleotide
  misc_feature 1..20: note = Target: ANGPTL3; (+) strand; PAM type: YTN; PAM sequence: TTA
  source 1..20: mol_type = other DNA
gttttttgtttccctaatgt

SEQ ID NO: 14717 - DNA, 20 bp, synthetic construct
  misc_feature 1..20: note = Description of Artificial Sequence: Synthetic oligonucleotide
  misc_feature 1..20: note = Target: ANGPTL3; (+) strand; PAM type: YTN; PAM sequence: TTT
  source 1..20: mol_type = other DNA
tttgtttccctaatgttata

SEQ ID NO: 14718 - DNA, 20 bp, synthetic construct
  misc_feature 1..20: note = Description of Artificial Sequence: Synthetic oligonucleotide
  misc_feature 1..20: note = Target: ANGPTL3; (+) strand; PAM type: YTN; PAM sequence: TTT
  source 1..20: mol_type = other DNA
ttgtttccctaatgttatat

SEQ ID NO: 14719 - DNA, 20 bp, synthetic construct
  misc_feature 1..20: note = Description of Artificial Sequence: Synthetic oligonucleotide
  misc_feature 1..20: note = Target: ANGPTL3; (+) strand; PAM type: YTN; PAM sequence: TTT
  source 1..20: mol_type = other DNA
tgtttccctaatgttatata

SEQ ID NO: 14720 - DNA, 20 bp, synthetic construct
  misc_feature 1..20: note = Description of Artificial Sequence: Synthetic oligonucleotide
  misc_feature 1..20: note = Target: ANGPTL3; (+) strand; PAM type: YTN; PAM sequence: TTT
  source 1..20: mol_type = other DNA
gtttccctaatgttatatat

SEQ ID NO: 14721 - DNA, 20 bp, synthetic construct
  misc_feature 1..20: note = Description of Artificial Sequence: Synthetic oligonucleotide
  misc_feature 1..20: note = Target: ANGPTL3; (+) strand; PAM type: YTN; PAM sequence: TTG
  source 1..20: mol_type = other DNA
tttccctaatgttatatatg

SEQ ID NO: 14722 - DNA, 20 bp, synthetic construct
  misc_feature 1..20: note = Description of Artificial Sequence: Synthetic oligonucleotide
  misc_feature 1..20: note = Target: ANGPTL3; (+) strand; PAM type: YTN; PAM sequence: TTT
  source 1..20: mol_type = other DNA
ccctaatgttatatatgaaa

SEQ ID NO: 14723 - DNA, 20 bp, synthetic construct
  misc_feature 1..20: note = Description of Artificial Sequence: Synthetic oligonucleotide
  misc_feature 1..20: note = Target: ANGPTL3; (+) strand; PAM type: YTN; PAM sequence: TTC
  source 1..20: mol_type = other DNA
cctaatgttatatatgaaaa

SEQ ID NO: 14724 - DNA, 20 bp, synthetic construct
  misc_feature 1..20: note = Description of Artificial Sequence: Synthetic oligonucleotide
  misc_feature 1..20: note = Target: ANGPTL3; (+) strand; PAM type: YTN; PAM sequence: CTA
  source 1..20: mol_type = other DNA
atgttatatatgaaaacact

SEQ ID NO: 14725 - DNA, 20 bp, synthetic construct
  misc_feature 1..20: note = Description of Artificial Sequence: Synthetic oligonucleotide
  misc_feature 1..20: note = Target: ANGPTL3; (+) strand; PAM type: YTN; PAM sequence: TTA
  source 1..20: mol_type = other DNA
tatatgaaaacactgaaaat

SEQ ID NO: 14726 - DNA, 20 bp, synthetic construct
  misc_feature 1..20: note = Description of Artificial Sequence: Synthetic oligonucleotide
  misc_feature 1..20: note = Target: ANGPTL3; (+) strand; PAM type: YTN; PAM sequence: CTG
  source 1..20: mol_type = other DNA
aaaatttgcattttatatga

SEQ ID NO: 14727 - DNA, 20 bp, synthetic construct
  misc_feature 1..20: note = Description of Artificial Sequence: Synthetic oligonucleotide
  misc_feature 1..20: note = Target: ANGPTL3; (+) strand; PAM type: YTN; PAM sequence: TTT
  source 1..20: mol_type = other DNA
gcattttatatgaaaattac

SEQ ID NO: 14728 - DNA, 20 bp, synthetic construct
  misc_feature 1..20: note = Description of Artificial Sequence: Synthetic oligonucleotide
  misc_feature 1..20: note = Target: ANGPTL3; (+) strand; PAM type: YTN; PAM sequence: TTG
  source 1..20: mol_type = other DNA
cattttatatgaaaattaca

SEQ ID NO: 14729 - DNA, 20 bp, synthetic construct
  misc_feature 1..20: note = Description of Artificial Sequence: Synthetic oligonucleotide
  misc_feature 1..20: note = Target: ANGPTL3; (+) strand; PAM type: YTN; PAM sequence: TTT
  source 1..20: mol_type = other DNA
tatatgaaaattacaaatcg

SEQ ID NO: 14730 - DNA, 20 bp, synthetic construct
  misc_feature 1..20: note = Description of Artificial Sequence: Synthetic oligonucleotide
  misc_feature 1..20: note = Target: ANGPTL3; (+) strand; PAM type: YTN; PAM sequence: TTT
  source 1..20: mol_type = other DNA
atatgaaaattacaaatcgg

SEQ ID NO: 14731 - DNA, 20 bp, synthetic construct
  misc_feature 1..20: note = Description of Artificial Sequence: Synthetic oligonucleotide
  misc_feature 1..20: note = Target: ANGPTL3; (+) strand; PAM type: YTN; PAM sequence: TTA
  source 1..20: mol_type = other DNA
tatgaaaattacaaatcggt

SEQ ID NO: 14732 - DNA, 20 bp, synthetic construct
  misc_feature 1..20: note = Description of Artificial Sequence: Synthetic oligonucleotide
  misc_feature 1..20: note = Target: ANGPTL3; (+) strand; PAM type: YTN; PAM sequence: TTA
  source 1..20: mol_type = other DNA
caaatcggttaaattataca

SEQ ID NO: 14733 - DNA, 20 bp, synthetic construct
  misc_feature 1..20: note = Description of Artificial Sequence: Synthetic oligonucleotide
  misc_feature 1..20: note = Target: ANGPTL3; (+) strand; PAM type: YTN; PAM sequence: TTA
  source 1..20: mol_type = other DNA
aattatacaatctagaacac

SEQ ID NO: 14734 - DNA, 20 bp, synthetic construct
  misc_feature 1..20: note = Description of Artificial Sequence: Synthetic oligonucleotide
  misc_feature 1..20: note = Target: ANGPTL3; (+) strand; PAM type: YTN; PAM sequence: TTA
  source 1..20: mol_type = other DNA
tacaatctagaacactatgt

SEQ ID NO: 14735 - DNA, 20 bp, synthetic construct
  misc_feature 1..20: note = Description of Artificial Sequence: Synthetic oligonucleotide
  misc_feature 1..20: note = Target: ANGPTL3; (+) strand; PAM type: YTN; PAM sequence: CTA
  source 1..20: mol_type = other DNA
gaacactatgtcattacact

SEQ ID NO: 14736 - DNA, 20 bp, synthetic construct
  misc_feature 1..20: note = Description of Artificial Sequence: Synthetic oligonucleotide
  misc_feature 1..20: note = Target: ANGPTL3; (+) strand; PAM type: YTN; PAM sequence: CTA
  source 1..20: mol_type = other DNA
tgtcattacactattgtaaa

SEQ ID NO: 14737 - DNA, 20 bp, synthetic construct
  misc_feature 1..20: note = Description of Artificial Sequence: Synthetic oligonucleotide
  misc_feature 1..20: note = Target: ANGPTL3; (+) strand; PAM type: YTN; PAM sequence: TTA
  source 1..20: mol_type = other DNA
cactattgtaaattactgaa

SEQ ID NO: 14738 - DNA, 20 bp, synthetic construct
  misc_feature 1..20: note = Description of Artificial Sequence: Synthetic oligonucleotide
  misc_feature 1..20: note = Target: ANGPTL3; (+) strand; PAM type: YTN; PAM sequence: CTA
  source 1..20: mol_type = other DNA
ttgtaaattactgaaggtaa

SEQ ID NO: 14739 - DNA, 20 bp, synthetic construct
  misc_feature 1..20: note = Description of Artificial Sequence: Synthetic oligonucleotide
  misc_feature 1..20: note = Target: ANGPTL3; (+) strand; PAM type: YTN; PAM sequence: TTG
  source 1..20: mol_type = other DNA
taaattactgaaggtaagta

SEQ ID NO: 14740 - DNA, 20 bp, synthetic construct
  misc_feature 1..20: note = Description of Artificial Sequence: Synthetic oligonucleotide
  misc_feature 1..20: note = Target: ANGPTL3; (+) strand; PAM type: YTN; PAM sequence: TTA
  source 1..20: mol_type = other DNA
ctgaaggtaagtaaaaagtt

SEQ ID NO: 14741 - DNA, 20 bp, synthetic construct
  misc_feature 1..20: note = Description of Artificial Sequence: Synthetic oligonucleotide
  misc_feature 1..20: note = Target: ANGPTL3; (+) strand; PAM type: YTN; PAM sequence: CTG
  source 1..20: mol_type = other DNA
aaggtaagtaaaaagttaaa

SEQ ID NO: 14742 - DNA, 20 bp, synthetic construct
  misc_feature 1..20: note = Description of Artificial Sequence: Synthetic oligonucleotide
  misc_feature 1..20: note = Target: ANGPTL3; (+) strand; PAM type: YTN; PAM sequence: TTA
  source 1..20: mol_type = other DNA
aaaaaaatttaaaactattc

SEQ ID NO: 14743 - DNA, 20 bp, synthetic construct
  misc_feature 1..20: note = Description of Artificial Sequence: Synthetic oligonucleotide
  misc_feature 1..20: note = Target: ANGPTL3; (+) strand; PAM type: YTN; PAM sequence: TTT
  source 1..20: mol_type = other DNA
aaaactattctccagtgttt

SEQ ID NO: 14744 - DNA, 20 bp, synthetic construct
  misc_feature 1..20: note = Description of Artificial Sequence: Synthetic oligonucleotide
  misc_feature 1..20: note = Target: ANGPTL3; (+) strand; PAM type: YTN; PAM sequence: TTA
  source 1..20: mol_type = other DNA
aaactattctccagtgttta

SEQ ID NO: 14745 - DNA, 20 bp, synthetic construct
  misc_feature 1..20: note = Description of Artificial Sequence: Synthetic oligonucleotide
  misc_feature 1..20: note = Target: ANGPTL3; (+) strand; PAM type: YTN; PAM sequence: CTA
  source 1..20: mol_type = other DNA
ttctccagtgtttaaaacag

SEQ ID NO: 14746 - DNA, 20 bp, synthetic construct
  misc_feature 1..20: note = Description of Artificial Sequence: Synthetic oligonucleotide
  misc_feature 1..20: note = Target: ANGPTL3; (+) strand; PAM type: YTN; PAM sequence: TTC
  source 1..20: mol_type = other DNA
tccagtgtttaaaacagatt

SEQ ID NO: 14747 - DNA, 20 bp, synthetic construct
  misc_feature 1..20: note = Description of Artificial Sequence: Synthetic oligonucleotide
  misc_feature 1..20: note = Target: ANGPTL3; (+) strand; PAM type: YTN; PAM sequence: CTC
  source 1..20: mol_type = other DNA
cagtgtttaaaacagattaa

SEQ ID NO: 14748 - DNA, 20 bp, synthetic construct
  misc_feature 1..20: note = Description of Artificial Sequence: Synthetic oligonucleotide
  misc_feature 1..20: note = Target: ANGPTL3; (+) strand; PAM type: YTN; PAM sequence: TTT
  source 1..20: mol_type = other DNA
aaaacagattaaataataca

SEQ ID NO: 14749 - DNA, 20 bp, synthetic construct
  misc_feature 1..20: note = Description of Artificial Sequence: Synthetic oligonucleotide
  misc_feature 1..20: note = Target: ANGPTL3; (+) strand; PAM type: YTN; PAM sequence: TTA
  source 1..20: mol_type = other DNA
aaacagattaaataatacag

SEQ ID NO: 14750 - DNA, 20 bp, synthetic construct
  misc_feature 1..20: note = Description of Artificial Sequence: Synthetic oligonucleotide
  misc_feature 1..20: note = Target: ANGPTL3; (+) strand; PAM type: YTN; PAM sequence: TTA
  source 1..20: mol_type = other DNA
aataatacagtaaatggaaa

SEQ ID NO: 14751 - DNA, 20 bp, synthetic construct
  misc_feature 1..20: note = Description of Artificial Sequence: Synthetic oligonucleotide
  misc_feature 1..20: note = Target: ANGPTL3; (+) strand; PAM type: YTN; PAM sequence: TTT
  source 1..20: mol_type = other DNA
attcatatgaaaatatgctg

SEQ ID NO: 14752 - DNA, 20 bp, synthetic construct
  misc_feature 1..20: note = Description of Artificial Sequence: Synthetic oligonucleotide
  misc_feature 1..20: note = Target: ANGPTL3; (+) strand; PAM type: YTN; PAM sequence: TTA
  source 1..20: mol_type = other DNA
ttcatatgaaaatatgctgg

SEQ ID NO: 14753 - DNA, 20 bp, synthetic construct
  misc_feature 1..20: note = Description of Artificial Sequence: Synthetic oligonucleotide
  misc_feature 1..20: note = Target: ANGPTL3; (+) strand; PAM type: YTN; PAM sequence: TTC
  source 1..20: mol_type = other DNA
atatgaaaatatgctgggct

SEQ ID NO: 14754 - DNA, 20 bp, synthetic construct
  misc_feature 1..20: note = Description of Artificial Sequence: Synthetic oligonucleotide
  misc_feature 1..20: note = Target: ANGPTL3; (+) strand; PAM type: YTN; PAM sequence: CTG
  source 1..20: mol_type = other DNA
ggctttttcttttaattgaa

SEQ ID NO: 14755 - DNA, 20 bp, synthetic construct
  misc_feature 1..20: note = Description of Artificial Sequence: Synthetic oligonucleotide
  misc_feature 1..20: note = Target: ANGPTL3; (+) strand; PAM type: YTN; PAM sequence: CTT
  source 1..20: mol_type = other DNA
tttcttttaattgaagttca

SEQ ID NO: 14756 - DNA, 20 bp, synthetic construct
  misc_feature 1..20: note = Description of Artificial Sequence: Synthetic oligonucleotide
  misc_feature 1..20: note = Target: ANGPTL3; (+) strand; PAM type: YTN; PAM sequence: TTT
  source 1..20: mol_type = other DNA
ttcttttaattgaagttcag

SEQ ID NO: 14757 - DNA, 20 bp, synthetic construct
  misc_feature 1..20: note = Description of Artificial Sequence: Synthetic oligonucleotide
  misc_feature 1..20: note = Target: ANGPTL3; (+) strand; PAM type: YTN; PAM sequence: TTT
  source 1..20: mol_type = other DNA
tcttttaattgaagttcaga

SEQ ID NO: 14758 - DNA, 20 bp, synthetic construct
  misc_feature 1..20: note = Description of Artificial Sequence: Synthetic oligonucleotide
  misc_feature 1..20: note = Target: ANGPTL3; (+) strand; PAM type: YTN; PAM sequence: TTT
  source 1..20: mol_type = other DNA
cttttaattgaagttcagaa

SEQ ID NO: 14759 - DNA, 20 bp, synthetic construct
  misc_feature 1..20: note = Description of Artificial Sequence: Synthetic oligonucleotide
  misc_feature 1..20: note = Target: ANGPTL3; (+) strand; PAM type: YTN; PAM sequence: TTC
  source 1..20: mol_type = other DNA
ttttaattgaagttcagaaa

SEQ ID NO: 14760 - DNA, 20 bp, synthetic construct
  misc_feature 1..20: note = Description of Artificial Sequence: Synthetic oligonucleotide
  misc_feature 1..20: note = Target: ANGPTL3; (+) strand; PAM type: YTN; PAM sequence: CTT
  source 1..20: mol_type = other DNA
ttaattgaagttcagaaaat

SEQ ID NO: 14761 - DNA, 20 bp, synthetic construct
  misc_feature 1..20: note = Description of Artificial Sequence: Synthetic oligonucleotide
  misc_feature 1..20: note = Target: ANGPTL3; (+) strand; PAM type: YTN; PAM sequence: TTT
  source 1..20: mol_type = other DNA
taattgaagttcagaaaatc

SEQ ID NO: 14762 - DNA, 20 bp, synthetic construct
  misc_feature 1..20: note = Description of Artificial Sequence: Synthetic oligonucleotide
  misc_feature 1..20: note = Target: ANGPTL3; (+) strand; PAM type: YTN; PAM sequence: TTT
  source 1..20: mol_type = other DNA
aattgaagttcagaaaatca

SEQ ID NO: 14763 - DNA, 20 bp, synthetic construct
  misc_feature 1..20: note = Description of Artificial Sequence: Synthetic oligonucleotide
  misc_feature 1..20: note = Target: ANGPTL3; (+) strand; PAM type: YTN; PAM sequence: TTA
  source 1..20: mol_type = other DNA
attgaagttcagaaaatcaa

SEQ ID NO: 14764 - DNA, 20 bp, synthetic construct
  misc_feature 1..20: note = Description of Artificial Sequence: Synthetic oligonucleotide
  misc_feature 1..20: note = Target: ANGPTL3; (+) strand; PAM type: YTN; PAM sequence: TTG
  source 1..20: mol_type = other DNA
aagttcagaaaatcaaattt

SEQ ID NO: 14765 - DNA, 20 bp, synthetic construct
  misc_feature 1..20: note = Description of Artificial Sequence: Synthetic oligonucleotide
  misc_feature 1..20: note = Target: ANGPTL3; (+) strand; PAM type: YTN; PAM sequence: TTC
  source 1..20: mol_type = other DNA
agaaaatcaaattttagaga

SEQ ID NO: 14766 - DNA, 20 bp, synthetic construct
  misc_feature 1..20: note = Description of Artificial Sequence: Synthetic oligonucleotide
  misc_feature 1..20: note = Target: ANGPTL3; (+) strand; PAM type: YTN; PAM sequence: TTT
  source 1..20: mol_type = other DNA
tagagatagtacaatttaaa

SEQ ID NO: 14767 - DNA, 20 bp, synthetic construct
  misc_feature 1..20: note = Description of Artificial Sequence: Synthetic oligonucleotide
  misc_feature 1..20: note = Target: ANGPTL3; (+) strand; PAM type: YTN; PAM sequence: TTT
  source 1..20: mol_type = other DNA
agagatagtacaatttaaat

SEQ ID NO: 14768 - DNA, 20 bp, synthetic construct
  misc_feature 1..20: note = Description of Artificial Sequence: Synthetic oligonucleotide
  misc_feature 1..20: note = Target: ANGPTL3; (+) strand; PAM type: YTN; PAM sequence: TTA
  source 1..20: mol_type = other DNA
gagatagtacaatttaaata

SEQ ID NO: 14769 - DNA, 20 bp, synthetic construct
  misc_feature 1..20: note = Description of Artificial Sequence: Synthetic oligonucleotide
  misc_feature 1..20: note = Target: ANGPTL3; (+) strand; PAM type: YTN; PAM sequence: TTT
  source 1..20: mol_type = other DNA
aaataaaatgttaaggacaa

SEQ ID NO: 14770 - DNA, 20 bp, synthetic construct
  misc_feature 1..20: note = Description of Artificial Sequence: Synthetic oligonucleotide
  misc_feature 1..20: note = Target: ANGPTL3; (+) strand; PAM type: YTN; PAM sequence: TTA
  source 1..20: mol_type = other DNA
aataaaatgttaaggacaaa

SEQ ID NO: 14771 - DNA, 20 bp, synthetic construct
  misc_feature 1..20: note = Description of Artificial Sequence: Synthetic oligonucleotide
  misc_feature 1..20: note = Target: ANGPTL3; (+) strand; PAM type: YTN; PAM sequence: TTA
  source 1..20: mol_type = other DNA
aggacaaaaatatgtgctat

SEQ ID NO: 14772 - DNA, 20 bp, synthetic construct
  misc_feature 1..20: note = Description of Artificial Sequence: Synthetic oligonucleotide
  misc_feature 1..20: note = Target: ANGPTL3; (+) strand; PAM type: YTN; PAM sequence: CTA
  source 1..20: mol_type = other DNA
tttgaaagaagcatacaagg

SEQ ID NO: 14773 - DNA, 20 bp, synthetic construct
  misc_feature 1..20: note = Description of Artificial Sequence: Synthetic oligonucleotide
  misc_feature 1..20: note = Target: ANGPTL3; (+) strand; PAM type: YTN; PAM sequence: TTT
  source 1..20: mol_type = other DNA
gaaagaagcatacaagggga

SEQ ID NO: 14774 - DNA, 20 bp, synthetic construct
  misc_feature 1..20: note = Description of Artificial Sequence: Synthetic oligonucleotide
  misc_feature 1..20: note = Target: ANGPTL3; (+) strand; PAM type: YTN; PAM sequence: TTG
  source 1..20: mol_type = other DNA
aaagaagcatacaaggggaa

SEQ ID NO: 14775 - DNA, 20 bp, synthetic construct
  misc_feature 1..20: note = Description of Artificial Sequence: Synthetic oligonucleotide
  misc_feature 1..20: note = Target: ANGPTL3; (+) strand; PAM type: YTN; PAM sequence: TTG
  source 1..20: mol_type = other DNA
ccaatattcatttttcaaat

SEQ ID NO: 14776 - DNA, 20 bp, synthetic construct
  misc_feature 1..20: note = Description of Artificial Sequence: Synthetic oligonucleotide
  misc_feature 1..20: note = Target: ANGPTL3; (+) strand; PAM type: YTN; PAM sequence: TTC
  source 1..20: mol_type = other DNA
atttttcaaatccattatta

SEQ ID NO: 14777 - DNA, 20 bp, synthetic construct
  misc_feature 1..20: note = Description of Artificial Sequence: Synthetic oligonucleotide
  misc_feature 1..20: note = Target: ANGPTL3; (+) strand; PAM type: YTN; PAM sequence: TTT
  source 1..20: mol_type = other DNA
ttcaaatccattattagttt

SEQ ID NO: 14778 - DNA, 20 bp, synthetic construct
  misc_feature 1..20: note = Description of Artificial Sequence: Synthetic oligonucleotide
  misc_feature 1..20: note = Target: ANGPTL3; (+) strand; PAM type: YTN; PAM sequence: TTT
  source 1..20: mol_type = other DNA
tcaaatccattattagttta

SEQ ID NO: 14779 - DNA, 20 bp, synthetic construct
  misc_feature 1..20: note = Description of Artificial Sequence: Synthetic oligonucleotide
  misc_feature 1..20: note = Target: ANGPTL3; (+) strand; PAM type: YTN; PAM sequence: TTT
  source 1..20: mol_type = other DNA
caaatccattattagtttaa

SEQ ID NO: 14780 - DNA, 20 bp, synthetic construct
  misc_feature 1..20: note = Description of Artificial Sequence: Synthetic oligonucleotide
  misc_feature 1..20: note = Target: ANGPTL3; (+) strand; PAM type: YTN; PAM sequence: TTC
  source 1..20: mol_type = other DNA
aaatccattattagtttaaa

SEQ ID NO: 14781 - DNA, 20 bp, synthetic construct
  misc_feature 1..20: note = Description of Artificial Sequence: Synthetic oligonucleotide
  misc_feature 1..20: note = Target: ANGPTL3; (+) strand; PAM type: YTN; PAM sequence: TTA
  source 1..20: mol_type = other DNA
ttagtttaaaaatttagatt

SEQ ID NO: 14782 - DNA, 20 bp, synthetic construct
  misc_feature 1..20: note = Description of Artificial Sequence: Synthetic oligonucleotide
  misc_feature 1..20: note = Target: ANGPTL3; (+) strand; PAM type: YTN; PAM sequence: TTA
  source 1..20: mol_type = other DNA
gtttaaaaatttagattatg

SEQ ID NO: 14783 - DNA, 20 bp, synthetic construct
  misc_feature 1..20: note = Description of Artificial Sequence: Synthetic oligonucleotide
  misc_feature 1..20: note = Target: ANGPTL3; (+) strand; PAM type: YTN; PAM sequence: TTT
  source 1..20: mol_type = other DNA
aaaaatttagattatgatag

SEQ ID NO: 14784 - DNA, 20 bp, synthetic construct
  misc_feature 1..20: note = Description of Artificial Sequence: Synthetic oligonucleotide
  misc_feature 1..20: note = Target: ANGPTL3; (+) strand; PAM type: YTN; PAM sequence: TTA
  source 1..20: mol_type = other DNA
aaaatttagattatgatagt

SEQ ID NO: 14785 - DNA, 20 bp, synthetic construct
  misc_feature 1..20: note = Description of Artificial Sequence: Synthetic oligonucleotide
  misc_feature 1..20: note = Target: ANGPTL3; (+) strand; PAM type: YTN; PAM sequence: TTT
  source 1..20: mol_type = other DNA
agattatgatagtgttacag

SEQ ID NO: 14786 - DNA, 20 bp, synthetic construct
  misc_feature 1..20: note = Description of Artificial Sequence: Synthetic oligonucleotide
  misc_feature 1..20: note = Target: ANGPTL3; (+) strand; PAM type: YTN; PAM sequence: TTA
  source 1..20: mol_type = other DNA
gattatgatagtgttacagg

SEQ ID NO: 14787 - DNA, 20 bp, synthetic construct
  misc_feature 1..20: note = Description of Artificial Sequence: Synthetic oligonucleotide
  misc_feature 1..20: note = Target: ANGPTL3; (+) strand; PAM type: YTN; PAM sequence: TTA
  source 1..20: mol_type = other DNA
tgatagtgttacaggaaatt

SEQ ID NO: 14788 - DNA, 20 bp, synthetic construct
  misc_feature 1..20: note = Description of Artificial Sequence: Synthetic oligonucleotide
  misc_feature 1..20: note = Target: ANGPTL3; (+) strand; PAM type: YTN; PAM sequence: TTA
  source 1..20: mol_type = other DNA
caggaaattaatagaaaaga

SEQ ID NO: 14789 - DNA, 20 bp, synthetic construct
  misc_feature 1..20: note = Description of Artificial Sequence: Synthetic oligonucleotide
  misc_feature 1..20: note = Target: ANGPTL3; (+) strand; PAM type: YTN; PAM sequence: TTA
  source 1..20: mol_type = other DNA
atagaaaagaaagaggaaag

SEQ ID NO: 14790 - DNA, 20 bp, synthetic construct
  misc_feature 1..20: note = Description of Artificial Sequence: Synthetic oligonucleotide
  misc_feature 1..20: note = Target: ANGPTL3; (+) strand; PAM type: YTN; PAM sequence: CTT
  source 1..20: mol_type = other DNA
ataaccaacctactctctat

SEQ ID NO: 14791 - DNA, 20 bp, synthetic construct
  misc_feature 1..20: note = Description of Artificial Sequence: Synthetic oligonucleotide
  misc_feature 1..20: note = Target: ANGPTL3; (+) strand; PAM type: YTN; PAM sequence: TTA
  source 1..20: mol_type = other DNA
taaccaacctactctctata

SEQ ID NO: 14792 - DNA, 20 bp, synthetic construct
  misc_feature 1..20: note = Description of Artificial Sequence: Synthetic oligonucleotide
  misc_feature 1..20: note = Target: ANGPTL3; (+) strand; PAM type: YTN; PAM sequence: CTA
  source 1..20: mol_type = other DNA
ctctctatatccagactttt

SEQ ID NO: 14793 - DNA, 20 bp, synthetic construct
  misc_feature 1..20: note = Description of Artificial Sequence: Synthetic oligonucleotide
  misc_feature 1..20: note = Target: ANGPTL3; (+) strand; PAM type: YTN; PAM sequence: CTC
  source 1..20: mol_type = other DNA
tctatatccagacttttgta

SEQ ID NO: 14794 - DNA, 20 bp, synthetic construct
  misc_feature 1..20: note = Description of Artificial Sequence: Synthetic oligonucleotide
  misc_feature 1..20: note = Target: ANGPTL3; (+) strand; PAM type: YTN; PAM sequence: CTC
  source 1..20: mol_type = other DNA
tatatccagacttttgtaga

SEQ ID NO: 14795 - DNA, 20 bp, synthetic construct
  misc_feature 1..20: note = Description of Artificial Sequence: Synthetic oligonucleotide
  misc_feature 1..20: note = Target: ANGPTL3; (+) strand; PAM type: YTN; PAM sequence: CTA
  source 1..20: mol_type = other DNA
tatccagacttttgtagaaa

SEQ ID NO: 14796 - DNA, 20 bp, synthetic construct
  misc_feature 1..20: note = Description of Artificial Sequence: Synthetic oligonucleotide
  misc_feature 1..20: note = Target: ANGPTL3; (+) strand; PAM type: YTN; PAM sequence: CTT
  source 1..20: mol_type = other DNA
ttgtagaaaaacaagataat

SEQ ID NO: 14797 - DNA, 20 bp, synthetic construct
  misc_feature 1..20: note = Description of Artificial Sequence: Synthetic oligonucleotide
  misc_feature 1..20: note = Target: ANGPTL3; (+) strand; PAM type: YTN; PAM sequence: TTT
  source 1..20: mol_type = other DNA
tgtagaaaaacaagataata

SEQ ID NO: 14798 - DNA, 20 bp, synthetic construct
  misc_feature 1..20: note = Description of Artificial Sequence: Synthetic oligonucleotide
  misc_feature 1..20: note = Target: ANGPTL3; (+) strand; PAM type: YTN; PAM sequence: TTT
  source 1..20: mol_type = other DNA
gtagaaaaacaagataatag

SEQ ID NO: 14799 - DNA, 20 bp, synthetic construct
  misc_feature 1..20: note = Description of Artificial Sequence: Synthetic oligonucleotide
  misc_feature 1..20: note = Target: ANGPTL3; (+) strand; PAM type: YTN; PAM sequence: TTG
  source 1..20: mol_type = other DNA
tagaaaaacaagataatagc

SEQ ID NO: 14800 - DNA, 20 bp, synthetic construct
  misc_feature 1..20: note = Description of Artificial Sequence: Synthetic oligonucleotide
  misc_feature 1..20: note = Target: ANGPTL3; (+) strand; PAM type: YTN; PAM sequence: CTT
  source 1..20: mol_type = other DNA
ctccagaccgtggaagacca

SEQ ID NO: 14801 - DNA, 20 bp, synthetic construct
  misc_feature 1..20: note = Description of Artificial Sequence: Synthetic oligonucleotide
  misc_feature 1..20: note = Target: ANGPTL3; (+) strand; PAM type: YTN; PAM sequence: TTC
  source 1..20: mol_type = other DNA
tccagaccgtggaagaccaa

SEQ ID NO: 14802 - DNA, 20 bp, synthetic construct
  misc_feature 1..20: note = Description of Artificial Sequence: Synthetic oligonucleotide
  misc_feature 1..20: note = Target: ANGPTL3; (+) strand; PAM type: YTN; PAM sequence: CTC
  source 1..20: mol_type = other DNA
cagaccgtggaagaccaata

SEQ ID NO: 14803 - DNA, 20 bp, synthetic construct
  misc_feature 1..20: note = Description of Artificial Sequence: Synthetic oligonucleotide
  misc_feature 1..20: note = Target: ANGPTL3; (+) strand; PAM type: YTN; PAM sequence: TTA
  source 1..20: mol_type = other DNA
aaccaacagcatagtcaaat

SEQ ID NO: 14804 - DNA, 20 bp, synthetic construct
  misc_feature 1..20: note = Description of Artificial Sequence: Synthetic oligonucleotide
  misc_feature 1..20: note = Target: ANGPTL3; (+) strand; PAM type: YTN; PAM sequence: TTT
  source 1..20: mol_type = other DNA
taatggtatgtcccatcttt

SEQ ID NO: 14805 - DNA, 20 bp, synthetic construct
  misc_feature 1..20: note = Description of Artificial Sequence: Synthetic oligonucleotide
  misc_feature 1..20: note = Target: ANGPTL3; (+) strand; PAM type: YTN; PAM sequence: TTT
  source 1..20: mol_type = other DNA
aatggtatgtcccatctttc

SEQ ID NO: 14806 - DNA, 20 bp, synthetic construct
  misc_feature 1..20: note = Description of Artificial Sequence: Synthetic oligonucleotide
  misc_feature 1..20: note = Target: ANGPTL3; (+) strand; PAM type: YTN; PAM sequence: TTA
  source 1..20: mol_type = other DNA
atggtatgtcccatctttca

SEQ ID NO: 14807 - DNA, 20 bp, synthetic construct
  misc_feature 1..20: note = Description of Artificial Sequence: Synthetic oligonucleotide
  misc_feature 1..20: note = Target: ANGPTL3; (+) strand; PAM type: YTN; PAM sequence: CTT
  source 1..20: mol_type = other DNA
tcacacaggtctgtaaaaac

SEQ ID NO: 14808 - DNA, 20 bp, synthetic construct
  misc_feature 1..20: note = Description of Artificial Sequence: Synthetic oligonucleotide
  misc_feature 1..20: note = Target: ANGPTL3; (+) strand; PAM type: YTN; PAM sequence: TTT
  source 1..20: mol_type = other DNA
cacacaggtctgtaaaaaca

SEQ ID NO: 14809 - DNA, 20 bp, synthetic construct
  misc_feature 1..20: note = Description of Artificial Sequence: Synthetic oligonucleotide
  misc_feature 1..20: note = Target: ANGPTL3; (+) strand; PAM type: YTN; PAM sequence: TTC
  source 1..20: mol_type = other DNA
acacaggtctgtaaaaacac

SEQ ID NO: 14810 - DNA, 20 bp, synthetic construct
  misc_feature 1..20: note = Description of Artificial Sequence: Synthetic oligonucleotide
  misc_feature 1..20: note = Target: ANGPTL3; (+) strand; PAM type: YTN; PAM sequence: CTG
  source 1..20: mol_type = other DNA
taaaaacactgaatcctaaa

SEQ ID NO: 14811 - DNA, 20 bp, synthetic construct
  misc_feature 1..20: note = Description of Artificial Sequence: Synthetic oligonucleotide
  misc_feature 1..20: note = Target: ANGPTL3; (+) strand; PAM type: YTN; PAM sequence: CTG
  source 1..20: mol_type = other DNA
aatcctaaaattatttacaa

SEQ ID NO: 14812 - DNA, 20 bp, synthetic construct
  misc_feature 1..20: note = Description of Artificial Sequence: Synthetic oligonucleotide
  misc_feature 1..20: note = Target: ANGPTL3; (+) strand; PAM type: YTN; PAM sequence: CTA
  source 1..20: mol_type = other DNA
aaattatttacaagctttaa

SEQ ID NO: 14813 - DNA, 20 bp, synthetic construct
  misc_feature 1..20: note = Description of Artificial Sequence: Synthetic oligonucleotide
  misc_feature 1..20: note = Target: ANGPTL3; (+) strand; PAM type: YTN; PAM sequence: TTA
  source 1..20: mol_type = other DNA
tttacaagctttaactggat

SEQ ID NO: 14814 - DNA, 20 bp, synthetic construct
  misc_feature 1..20: note = Description of Artificial Sequence: Synthetic oligonucleotide
  misc_feature 1..20: note = Target: ANGPTL3; (+) strand; PAM type: YTN; PAM sequence: TTT
  source 1..20: mol_type = other DNA
acaagctttaactggatcat

SEQ ID NO: 14815 - DNA, 20 bp, synthetic construct
  misc_feature 1..20: note = Description of Artificial Sequence: Synthetic oligonucleotide
  misc_feature 1..20: note = Target: ANGPTL3; (+) strand; PAM type: YTN; PAM sequence: TTA
  source 1..20: mol_type = other DNA
caagctttaactggatcatg

SEQ ID NO: 14816 - DNA, 20 bp, synthetic construct
  misc_feature 1..20: note = Description of Artificial Sequence: Synthetic oligonucleotide
  misc_feature 1..20: note = Target: ANGPTL3; (+) strand; PAM type: YTN; PAM sequence: CTT
  source 1..20: mol_type = other DNA
taactggatcatgagtaaaa

SEQ ID NO: 14817 - DNA, 20 bp, synthetic construct
  misc_feature 1..20: note = Description of Artificial Sequence: Synthetic oligonucleotide
  misc_feature 1..20: note = Target: ANGPTL3; (+) strand; PAM type: YTN; PAM sequence: TTT
  source 1..20: mol_type = other DNA
aactggatcatgagtaaaat

SEQ ID NO: 14818 - DNA, 20 bp, synthetic construct
  misc_feature 1..20: note = Description of Artificial Sequence: Synthetic oligonucleotide
  misc_feature 1..20: note = Target: ANGPTL3; (+) strand; PAM type: YTN; PAM sequence: TTA
  source 1..20: mol_type = other DNA
actggatcatgagtaaaatt

SEQ ID NO: 14819 - DNA, 20 bp, synthetic construct
  misc_feature 1..20: note = Description of Artificial Sequence: Synthetic oligonucleotide
  misc_feature 1..20: note = Target: ANGPTL3; (+) strand; PAM type: YTN; PAM sequence: CTG
  source 1..20: mol_type = other DNA
gatcatgagtaaaattatca

SEQ ID NO: 14820 - DNA, 20 bp, synthetic construct
  misc_feature 1..20: note = Description of Artificial Sequence: Synthetic oligonucleotide
  misc_feature 1..20: note = Target: ANGPTL3; (+) strand; PAM type: YTN; PAM sequence: TTA
  source 1..20: mol_type = other DNA
tcacatcagcataactgtta

SEQ ID NO: 14821 - DNA, 20 bp, synthetic construct
  misc_feature 1..20: note = Description of Artificial Sequence: Synthetic oligonucleotide
  misc_feature 1..20: note = Target: ANGPTL3; (+) strand; PAM type: YTN; PAM sequence: CTG
  source 1..20: mol_type = other DNA
ttaaaattgcaggctctgaa

SEQ ID NO: 14822 - DNA, 20 bp, synthetic construct
  misc_feature 1..20: note = Description of Artificial Sequence: Synthetic oligonucleotide
  misc_feature 1..20: note = Target: ANGPTL3; (+) strand; PAM type: YTN; PAM sequence: TTA
  source 1..20: mol_type = other DNA
aaattgcaggctctgaagct

SEQ ID NO: 14823 - DNA, 20 bp, synthetic construct
  misc_feature 1..20: note = Description of Artificial Sequence: Synthetic oligonucleotide
  misc_feature 1..20: note = Target: ANGPTL3; (+) strand; PAM type: YTN; PAM sequence: TTG
  source 1..20: mol_type = other DNA
caggctctgaagctaataaa

SEQ ID NO: 14824 - DNA, 20 bp, synthetic construct
  misc_feature 1..20: note = Description of Artificial Sequence: Synthetic oligonucleotide
  misc_feature 1..20: note = Target: ANGPTL3; (+) strand; PAM type: YTN; PAM sequence: CTC
  source 1..20: mol_type = other DNA
tgaagctaataaactacctg

SEQ ID NO: 14825 - DNA, 20 bp, synthetic construct
  misc_feature 1..20: note = Description of Artificial Sequence: Synthetic oligonucleotide
  misc_feature 1..20: note = Target: ANGPTL3; (+) strand; PAM type: YTN; PAM sequence: CTG
  source 1..20: mol_type = other DNA
aagctaataaactacctgca

SEQ ID NO: 14826 - DNA, 20 bp, synthetic construct
  misc_feature 1..20: note = Description of Artificial Sequence: Synthetic oligonucleotide
  misc_feature 1..20: note = Target: ANGPTL3; (+) strand; PAM type: YTN; PAM sequence: CTA
  source 1..20: mol_type = other DNA
ataaactacctgcatttaaa

SEQ ID NO: 14827 - DNA, 20 bp, synthetic construct
  misc_feature 1..20: note = Description of Artificial Sequence: Synthetic oligonucleotide
  misc_feature 1..20: note = Target: ANGPTL3; (+) strand; PAM type: YTN; PAM sequence: CTA
  source 1..20: mol_type = other DNA
cctgcatttaaaccatggct

SEQ ID NO: 14828 - DNA, 20 bp, synthetic construct
  misc_feature 1..20: note = Description of Artificial Sequence: Synthetic oligonucleotide
  misc_feature 1..20: note = Target: ANGPTL3; (+) strand; PAM type: YTN; PAM sequence: CTG
  source 1..20: mol_type = other DNA
catttaaaccatggctctaa

SEQ ID NO: 14829 - DNA, 20 bp, synthetic construct
  misc_feature 1..20: note = Description of Artificial Sequence: Synthetic oligonucleotide
  misc_feature 1..20: note = Target: ANGPTL3; (+) strand; PAM type: YTN; PAM sequence: TTT
  source 1..20: mol_type = other DNA
aaaccatggctctaaaactt

SEQ ID NO: 14830 - DNA, 20 bp, synthetic construct
  misc_feature 1..20: note = Description of Artificial Sequence: Synthetic oligonucleotide
  misc_feature 1..20: note = Target: ANGPTL3; (+) strand; PAM type: YTN; PAM sequence: TTA
  source 1..20: mol_type = other DNA
aaccatggctctaaaacttt

SEQ ID NO: 14831 - DNA, 20 bp, synthetic construct
  misc_feature 1..20: note = Description of Artificial Sequence: Synthetic oligonucleotide
  misc_feature 1..20: note = Target: ANGPTL3; (+) strand; PAM type: YTN; PAM sequence: CTC
  source 1..20: mol_type = other DNA
taaaactttgtgtgaccttg

SEQ ID NO: 14832 - DNA, 20 bp, synthetic construct
  misc_feature 1..20: note = Description of Artificial Sequence: Synthetic oligonucleotide
  misc_feature 1..20: note = Target: ANGPTL3; (+) strand; PAM type: YTN; PAM sequence: CTA
  source 1..20: mol_type = other DNA
aaactttgtgtgaccttgaa

SEQ ID NO: 14833 - DNA, 20 bp, synthetic construct
  misc_feature 1..20: note = Description of Artificial Sequence: Synthetic oligonucleotide
  misc_feature 1..20: note = Target: ANGPTL3; (+) strand; PAM type: YTN; PAM sequence: CTT
  source 1..20: mol_type = other DNA
tgtgtgaccttgaataaatt

SEQ ID NO: 14834 - DNA, 20 bp, synthetic construct
  misc_feature 1..20: note = Description of Artificial Sequence: Synthetic oligonucleotide
  misc_feature 1..20: note = Target: ANGPTL3; (+) strand; PAM type: YTN; PAM sequence: TTT
  source 1..20: mol_type = other DNA
gtgtgaccttgaataaatta

SEQ ID NO: 14835 - DNA, 20 bp, synthetic construct
  misc_feature 1..20: note = Description of Artificial Sequence: Synthetic oligonucleotide
  misc_feature 1..20: note = Target: ANGPTL3; (+) strand; PAM type: YTN; PAM sequence: TTG
  source 1..20: mol_type = other DNA
tgtgaccttgaataaattac

SEQ ID NO: 14836 - DNA, 20 bp, synthetic construct
  misc_feature 1..20: note = Description of Artificial Sequence: Synthetic oligonucleotide
  misc_feature 1..20: note = Target: ANGPTL3; (+) strand; PAM type: YTN; PAM sequence: CTT
  source 1..20: mol_type = other DNA
gaataaattacttcacccct

SEQ ID NO: 14837 - DNA, 20 bp, synthetic construct
  misc_feature 1..20: note = Description of Artificial Sequence: Synthetic oligonucleotide
  misc_feature 1..20: note = Target: ANGPTL3; (+) strand; PAM type: YTN; PAM sequence: TTG
  source 1..20: mol_type = other DNA
aataaattacttcacccctt

SEQ ID NO: 14838 - DNA, 20 bp, synthetic construct
  misc_feature 1..20: note = Description of Artificial Sequence: Synthetic oligonucleotide
  misc_feature 1..20: note = Target: ANGPTL3; (+) strand; PAM type: YTN; PAM sequence: TTA
  source 1..20: mol_type = other DNA
cttcacccctttatctctca

SEQ ID NO: 14839 - DNA, 20 bp, synthetic construct
  misc_feature 1..20: note = Description of Artificial Sequence: Synthetic oligonucleotide
  misc_feature 1..20: note = Target: ANGPTL3; (+) strand; PAM type: YTN; PAM sequence: CTT
  source 1..20: mol_type = other DNA
cacccctttatctctcagtt

SEQ ID NO: 14840 - DNA, 20 bp, synthetic construct
  misc_feature 1..20: note = Description of Artificial Sequence: Synthetic oligonucleotide
  misc_feature 1..20: note = Target: ANGPTL3; (+) strand; PAM type: YTN; PAM sequence: TTC
  source 1..20: mol_type = other DNA
acccctttatctctcagttt

SEQ ID NO: 14841 - DNA, 20 bp, synthetic construct
  misc_feature 1..20: note = Description of Artificial Sequence: Synthetic oligonucleotide
  misc_feature 1..20: note = Target: ANGPTL3; (+) strand; PAM type: YTN; PAM sequence: CTT
  source 1..20: mol_type = other DNA
tatctctcagtttcctcaca

SEQ ID NO: 14842 - DNA, 20 bp, synthetic construct
  misc_feature 1..20: note = Description of Artificial Sequence: Synthetic oligonucleotide
  misc_feature 1..20: note = Target: ANGPTL3; (+) strand; PAM type: YTN; PAM sequence: TTT
  source 1..20: mol_type = other DNA
atctctcagtttcctcacat

SEQ ID NO: 14843 - DNA, 20 bp, synthetic construct
  misc_feature 1..20: note = Description of Artificial Sequence: Synthetic oligonucleotide
  misc_feature 1..20: note = Target: ANGPTL3; (+) strand; PAM type: YTN; PAM sequence: TTA
  source 1..20: mol_type = other DNA
tctctcagtttcctcacata

SEQ ID NO: 14844 - DNA, 20 bp, synthetic construct
  misc_feature 1..20: note = Description of Artificial Sequence: Synthetic oligonucleotide
  misc_feature 1..20: note = Target: ANGPTL3; (+) strand; PAM type: YTN; PAM sequence: CTC
  source 1..20: mol_type = other DNA
tcagtttcctcacatatact

SEQ ID NO: 14845 - DNA, 20 bp, synthetic construct
  misc_feature 1..20: note = Description of Artificial Sequence: Synthetic oligonucleotide
  misc_feature 1..20: note = Target: ANGPTL3; (+) strand; PAM type: YTN; PAM sequence: CTC
  source 1..20: mol_type = other DNA
agtttcctcacatatactac

SEQ ID NO: 14846 - DNA, 20 bp, synthetic construct
  misc_feature 1..20: note = Description of Artificial Sequence: Synthetic oligonucleotide
  misc_feature 1..20: note = Target: ANGPTL3; (+) strand; PAM type: YTN; PAM sequence: TTT
  source 1..20: mol_type = other DNA
cctcacatatactacaaaga

SEQ ID NO: 14847 - DNA, 20 bp, synthetic construct
  misc_feature 1..20: note = Description of Artificial Sequence: Synthetic oligonucleotide
  misc_feature 1..20: note = Target: ANGPTL3; (+) strand; PAM type: YTN; PAM sequence: TTC
  source 1..20: mol_type = other DNA
ctcacatatactacaaagat

SEQ ID NO: 14848 - DNA, 20 bp, synthetic construct
  misc_feature 1..20: note = Description of Artificial Sequence: Synthetic oligonucleotide
  misc_feature 1..20: note = Target: ANGPTL3; (+) strand; PAM type: YTN; PAM sequence: CTC
  source 1..20: mol_type = other DNA
acatatactacaaagataat

SEQ ID NO: 14849 - DNA, 20 bp, synthetic construct
  misc_feature 1..20: note = Description of Artificial Sequence: Synthetic oligonucleotide
  misc_feature 1..20: note = Target: ANGPTL3; (+) strand; PAM type: YTN; PAM sequence: CTA
  source 1..20: mol_type = other DNA
caaagataataacagaactt

SEQ ID NO: 14850 - DNA, 20 bp, synthetic construct
  misc_feature 1..20: note = Description of Artificial Sequence: Synthetic oligonucleotide
  misc_feature 1..20: note = Target: ANGPTL3; (+) strand; PAM type: YTN; PAM sequence: CTT
  source 1..20: mol_type = other DNA
ataggattattgtaagaaaa

SEQ ID NO: 14851 - DNA, 20 bp, synthetic construct
  misc_feature 1..20: note = Description of Artificial Sequence: Synthetic oligonucleotide
  misc_feature 1..20: note = Target: ANGPTL3; (+) strand; PAM type: YTN; PAM sequence: TTA
  source 1..20: mol_type = other DNA
taggattattgtaagaaaaa

SEQ ID NO: 14852 - DNA, 20 bp, synthetic construct
  misc_feature 1..20: note = Description of Artificial Sequence: Synthetic oligonucleotide
  misc_feature 1..20: note = Target: ANGPTL3; (+) strand; PAM type: YTN; PAM sequence: TTA
  source 1..20: mol_type = other DNA
ttgtaagaaaaaaaattaat

SEQ ID NO: 14853 - DNA, 20 bp, synthetic construct
  misc_feature 1..20: note = Description of Artificial Sequence: Synthetic oligonucleotide
  misc_feature 1..20: note = Target: ANGPTL3; (+) strand; PAM type: YTN; PAM sequence: TTG
  source 1..20: mol_type = other DNA
taagaaaaaaaattaattca

SEQ ID NO: 14854 - DNA, 20 bp, synthetic construct
  misc_feature 1..20: note = Description of Artificial Sequence: Synthetic oligonucleotide
  misc_feature 1..20: note = Target: ANGPTL3; (+) strand; PAM type: YTN; PAM sequence: TTA
  source 1..20: mol_type = other DNA
attcatagcagccaatgtca

SEQ ID NO: 14855 - DNA, 20 bp, synthetic construct
  misc_feature 1..20: note = Description of Artificial Sequence: Synthetic oligonucleotide
  misc_feature 1..20: note = Target: ANGPTL3; (+) strand; PAM type: YTN; PAM sequence: TTC
  source 1..20: mol_type = other DNA
atagcagccaatgtcatctt

SEQ ID NO: 14856 - DNA, 20 bp, synthetic construct
  misc_feature 1..20: note = Description of Artificial Sequence: Synthetic oligonucleotide
  misc_feature 1..20: note = Target: ANGPTL3; (+) strand; PAM type: YTN; PAM sequence: CTT
  source 1..20: mol_type = other DNA
actaaaattcaaattagatc

SEQ ID NO: 14857 - DNA, 20 bp, synthetic construct
  misc_feature 1..20: note = Description of Artificial Sequence: Synthetic oligonucleotide
  misc_feature 1..20: note = Target: ANGPTL3; (+) strand; PAM type: YTN; PAM sequence: TTA
  source 1..20: mol_type = other DNA
ctaaaattcaaattagatca

SEQ ID NO: 14858 - DNA, 20 bp, synthetic construct
  misc_feature 1..20: note = Description of Artificial Sequence: Synthetic oligonucleotide
  misc_feature 1..20: note = Target: ANGPTL3; (+) strand; PAM type: YTN; PAM sequence: CTA
  source 1..20: mol_type = other DNA
aaattcaaattagatcatgt

SEQ ID NO: 14859 - DNA, 20 bp, synthetic construct
  misc_feature 1..20: note = Description of Artificial Sequence: Synthetic oligonucleotide
  misc_feature 1..20: note = Target: ANGPTL3; (+) strand; PAM type: YTN; PAM sequence: TTC
  source 1..20: mol_type = other DNA
aaattagatcatgtttctct

SEQ ID NO: 14860 - DNA, 20 bp, synthetic construct
  misc_feature 1..20: note = Description of Artificial Sequence: Synthetic oligonucleotide
  misc_feature 1..20: note = Target: ANGPTL3; (+) strand; PAM type: YTN; PAM sequence: TTA
  source 1..20: mol_type = other DNA
gatcatgtttctctttgctc

SEQ ID NO: 14861 - DNA, 20 bp, synthetic construct
  misc_feature 1..20: note = Description of Artificial Sequence: Synthetic oligonucleotide
  misc_feature 1..20: note = Target: ANGPTL3; (+) strand; PAM type: YTN; PAM sequence: TTT
  source 1..20: mol_type = other DNA
ctctttgctcaaaaccacac

SEQ ID NO: 14862 - DNA, 20 bp, synthetic construct
  misc_feature 1..20: note = Description of Artificial Sequence: Synthetic oligonucleotide
  misc_feature 1..20: note = Target: ANGPTL3; (+) strand; PAM type: YTN; PAM sequence: TTC
  source 1..20: mol_type = other DNA
tctttgctcaaaaccacaca

SEQ ID NO: 14863 - DNA, 20 bp, synthetic construct
  misc_feature 1..20: note = Description of Artificial Sequence: Synthetic oligonucleotide
  misc_feature 1..20: note = Target: ANGPTL3; (+) strand; PAM type: YTN; PAM sequence: CTC
  source 1..20: mol_type = other DNA
tttgctcaaaaccacacaat

SEQ ID NO: 14864 - DNA, 20 bp, synthetic construct
  misc_feature 1..20: note = Description of Artificial Sequence: Synthetic oligonucleotide
  misc_feature 1..20: note = Target: ANGPTL3; (+) strand; PAM type: YTN; PAM sequence: CTT
  source 1..20: mol_type = other DNA
tgctcaaaaccacacaatag

SEQ ID NO: 14865 - DNA, 20 bp, synthetic construct
  misc_feature 1..20: note = Description of Artificial Sequence: Synthetic oligonucleotide
  misc_feature 1..20: note = Target: ANGPTL3; (+) strand; PAM type: YTN; PAM sequence: TTT
  source 1..20: mol_type = other DNA
gctcaaaaccacacaatagc

SEQ ID NO: 14866 - DNA, 20 bp, synthetic construct
  misc_feature 1..20: note = Description of Artificial Sequence: Synthetic oligonucleotide
  misc_feature 1..20: note = Target: ANGPTL3; (+) strand; PAM type: YTN; PAM sequence: TTG
  source 1..20: mol_type = other DNA
ctcaaaaccacacaatagct

SEQ ID NO: 14867 - DNA, 20 bp, synthetic construct
  misc_feature 1..20: note = Description of Artificial Sequence: Synthetic oligonucleotide
  misc_feature 1..20: note = Target: ANGPTL3; (+) strand; PAM type: YTN; PAM sequence: CTC
  source 1..20: mol_type = other DNA
aaaaccacacaatagctttc

SEQ ID NO: 14868 - DNA, 20 bp, synthetic construct
  misc_feature 1..20: note = Description of Artificial Sequence: Synthetic oligonucleotide
  misc_feature 1..20: note = Target: ANGPTL3; (+) strand; PAM type: YTN; PAM sequence: CTT
  source 1..20: mol_type = other DNA
tccatttcactcatattggc

SEQ ID NO: 14869 - DNA, 20 bp, synthetic construct
  misc_feature 1..20: note = Description of Artificial Sequence: Synthetic oligonucleotide
  misc_feature 1..20: note = Target: ANGPTL3; (+) strand; PAM type: YTN; PAM sequence: TTT
  source 1..20: mol_type = other DNA
ccatttcactcatattggct

SEQ ID NO: 14870 - DNA, 20 bp, synthetic construct
  misc_feature 1..20: note = Description of Artificial Sequence: Synthetic oligonucleotide
  misc_feature 1..20: note = Target: ANGPTL3; (+) strand; PAM type: YTN; PAM sequence: TTC
  source 1..20: mol_type = other DNA
catttcactcatattggctc

SEQ ID NO: 14871 - DNA, 20 bp, synthetic construct
  misc_feature 1..20: note = Description of Artificial Sequence: Synthetic oligonucleotide
  misc_feature 1..20: note = Target: ANGPTL3; (+) strand; PAM type: YTN; PAM sequence: TTT
  source 1..20: mol_type = other DNA
cactcatattggctctttag

SEQ ID NO: 14872 - DNA, 20 bp, synthetic construct
  misc_feature 1..20: note = Description of Artificial Sequence: Synthetic oligonucleotide
  misc_feature 1..20: note = Target: ANGPTL3; (+) strand; PAM type: YTN; PAM sequence: TTC
  source 1..20: mol_type = other DNA
actcatattggctctttaga

SEQ ID NO: 14873 - DNA, 20 bp, synthetic construct
  misc_feature 1..20: note = Description of Artificial Sequence: Synthetic oligonucleotide
  misc_feature 1..20: note = Target: ANGPTL3; (+) strand; PAM type: YTN; PAM sequence: CTC
  source 1..20: mol_type = other DNA
atattggctctttagaccaa

SEQ ID NO: 14874 - DNA, 20 bp, synthetic construct
  misc_feature 1..20: note = Description of Artificial Sequence: Synthetic oligonucleotide
  misc_feature 1..20: note = Target: ANGPTL3; (+) strand; PAM type: YTN; PAM sequence: TTG
  source 1..20: mol_type = other DNA
gctctttagaccaagattac

SEQ ID NO: 14875 - DNA, 20 bp, synthetic construct
  misc_feature 1..20: note = Description of Artificial Sequence: Synthetic oligonucleotide
  misc_feature 1..20: note = Target: ANGPTL3; (+) strand; PAM type: YTN; PAM sequence: CTC
  source 1..20: mol_type = other DNA
tttagaccaagattacccaa

SEQ ID NO: 14876 - DNA, 20 bp, synthetic construct
  misc_feature 1..20: note = Description of Artificial Sequence: Synthetic oligonucleotide
  misc_feature 1..20: note = Target: ANGPTL3; (+) strand; PAM type: YTN; PAM sequence: CTT
  source 1..20: mol_type = other DNA
tagaccaagattacccaacc

SEQ ID NO: 14877 - DNA, 20 bp, synthetic construct
  misc_feature 1..20: note = Description of Artificial Sequence: Synthetic oligonucleotide
  misc_feature 1..20: note = Target: ANGPTL3; (+) strand; PAM type: YTN; PAM sequence: TTT
  source 1..20: mol_type = other DNA
agaccaagattacccaaccc

SEQ ID NO: 14878 - DNA, 20 bp, synthetic construct
  misc_feature 1..20: note = Description of Artificial Sequence: Synthetic oligonucleotide
  misc_feature 1..20: note = Target: ANGPTL3; (+) strand; PAM type: YTN; PAM sequence: TTA
  source 1..20: mol_type = other DNA
gaccaagattacccaaccct

SEQ ID NO: 14879 - DNA, 20 bp, synthetic construct
  misc_feature 1..20: note = Description of Artificial Sequence: Synthetic oligonucleotide
  misc_feature 1..20: note = Target: ANGPTL3; (+) strand; PAM type: YTN; PAM sequence: TTA
  source 1..20: mol_type = other DNA
cccaacccttcgtcatctca

SEQ ID NO: 14880 - DNA, 20 bp, synthetic construct
  misc_feature 1..20: note = Description of Artificial Sequence: Synthetic oligonucleotide
  misc_feature 1..20: note = Target: ANGPTL3; (+) strand; PAM type: YTN; PAM sequence: CTT
  source 1..20: mol_type = other DNA
cgtcatctcactgacttcac

SEQ ID NO: 14881 - DNA, 20 bp, synthetic construct
  misc_feature 1..20: note = Description of Artificial Sequence: Synthetic oligonucleotide
  misc_feature 1..20: note = Target: ANGPTL3; (+) strand; PAM type: YTN; PAM sequence: TTC
  source 1..20: mol_type = other DNA
gtcatctcactgacttcacc

SEQ ID NO: 14882 - DNA, 20 bp, synthetic construct
  misc_feature 1..20: note = Description of Artificial Sequence: Synthetic oligonucleotide
  misc_feature 1..20: note = Target: ANGPTL3; (+) strand; PAM type: YTN; PAM sequence: CTC
  source 1..20: mol_type = other DNA
actgacttcacctcctctac

SEQ ID NO: 14883 - DNA, 20 bp, synthetic construct
  misc_feature 1..20: note = Description of Artificial Sequence: Synthetic oligonucleotide
  misc_feature 1..20: note = Target: ANGPTL3; (+) strand; PAM type: YTN; PAM sequence: CTG
  source 1..20: mol_type = other DNA
acttcacctcctctactcta

SEQ ID NO: 14884 - DNA, 20 bp, synthetic construct
  misc_feature 1..20: note = Description of Artificial Sequence: Synthetic oligonucleotide
  misc_feature 1..20: note = Target: ANGPTL3; (+) strand; PAM type: YTN; PAM sequence: CTT
  source 1..20: mol_type = other DNA
cacctcctctactctagtta

SEQ ID NO: 14885 - DNA, 20 bp, synthetic construct
  misc_feature 1..20: note = Description of Artificial Sequence: Synthetic oligonucleotide
  misc_feature 1..20: note = Target: ANGPTL3; (+) strand; PAM type: YTN; PAM sequence: TTC
  source 1..20: mol_type = other DNA
acctcctctactctagttat

SEQ ID NO: 14886 - DNA, 20 bp, synthetic construct
  misc_feature 1..20: note = Description of Artificial Sequence: Synthetic oligonucleotide
  misc_feature 1..20: note = Target: ANGPTL3; (+) strand; PAM type: YTN; PAM sequence: CTC
  source 1..20: mol_type = other DNA
ctctactctagttattctga

SEQ ID NO: 14887 - DNA, 20 bp, synthetic construct
  misc_feature 1..20: note = Description of Artificial Sequence: Synthetic oligonucleotide
  misc_feature 1..20: note = Target: ANGPTL3; (+) strand; PAM type: YTN; PAM sequence: CTC
  source 1..20: mol_type = other DNA
tactctagttattctgaccg

SEQ ID NO: 14888 - DNA, 20 bp, synthetic construct
  misc_feature 1..20: note = Description of Artificial Sequence: Synthetic oligonucleotide
  misc_feature 1..20: note = Target: ANGPTL3; (+) strand; PAM type: YTN; PAM sequence: CTA
  source 1..20: mol_type = other DNA
ctctagttattctgaccgct

SEQ ID NO: 14889 - DNA, 20 bp, synthetic construct
  misc_feature 1..20: note = Description of Artificial Sequence: Synthetic oligonucleotide
  misc_feature 1..20: note = Target: ANGPTL3; (+) strand; PAM type: YTN; PAM sequence: CTC
  source 1..20: mol_type = other DNA
tagttattctgaccgcttta

SEQ ID NO: 14890 - DNA, 20 bp, synthetic construct
  misc_feature 1..20: note = Description of Artificial Sequence: Synthetic oligonucleotide
  misc_feature 1..20: note = Target: ANGPTL3; (+) strand; PAM type: YTN; PAM sequence: CTA
  source 1..20: mol_type = other DNA
gttattctgaccgctttacc

SEQ ID NO: 14891 - DNA, 20 bp, synthetic construct
  misc_feature 1..20: note = Description of Artificial Sequence: Synthetic oligonucleotide
  misc_feature 1..20: note = Target: ANGPTL3; (+) strand; PAM type: YTN; PAM sequence: TTA
  source 1..20: mol_type = other DNA
ttctgaccgctttaccagta

SEQ ID NO: 14892 - DNA, 20 bp, synthetic construct
  misc_feature 1..20: note = Description of Artificial Sequence: Synthetic oligonucleotide
  misc_feature 1..20: note = Target: ANGPTL3; (+) strand; PAM type: YTN; PAM sequence: TTC
  source 1..20: mol_type = other DNA
tgaccgctttaccagtattc

SEQ ID NO: 14893 - DNA, 20 bp, synthetic construct
  misc_feature 1..20: note = Description of Artificial Sequence: Synthetic oligonucleotide
  misc_feature 1..20: note = Target: ANGPTL3; (+) strand; PAM type: YTN; PAM sequence: CTG
  source 1..20: mol_type = other DNA
accgctttaccagtattcaa

SEQ ID NO: 14894 - DNA, 20 bp, synthetic construct
  misc_feature 1..20: note = Description of Artificial Sequence: Synthetic oligonucleotide
  misc_feature 1..20: note = Target: ANGPTL3; (+) strand; PAM type: YTN; PAM sequence: CTT
  source 1..20: mol_type = other DNA
taccagtattcaaacacatc

SEQ ID NO: 14895 - DNA, 20 bp, synthetic construct
  misc_feature 1..20: note = Description of Artificial Sequence: Synthetic oligonucleotide
  misc_feature 1..20: note = Target: ANGPTL3; (+) strand; PAM type: YTN; PAM sequence: TTT
  source 1..20: mol_type = other DNA
accagtattcaaacacatca

SEQ ID NO: 14896 - DNA, 20 bp, synthetic construct
  misc_feature 1..20: note = Description of Artificial Sequence: Synthetic oligonucleotide
  misc_feature 1..20: note = Target: ANGPTL3; (+) strand; PAM type: YTN; PAM sequence: TTA
  source 1..20: mol_type = other DNA
ccagtattcaaacacatcaa

SEQ ID NO: 14897 - DNA, 20 bp, synthetic construct
  misc_feature 1..20: note = Description of Artificial Sequence: Synthetic oligonucleotide
  misc_feature 1..20: note = Target: ANGPTL3; (+) strand; PAM type: YTN; PAM sequence: TTC
  source 1..20: mol_type = other DNA
aaacacatcaaacatactgc

SEQ ID NO: 14898 - DNA, 20 bp, synthetic construct
  misc_feature 1..20: note = Description of Artificial Sequence: Synthetic oligonucleotide
  misc_feature 1..20: note = Target: ANGPTL3; (+) strand; PAM type: YTN; PAM sequence: CTG
  source 1..20: mol_type = other DNA
ccacctcaaagcctttgccc

SEQ ID NO: 14899 - DNA, 20 bp, synthetic construct
  misc_feature 1..20: note = Description of Artificial Sequence: Synthetic oligonucleotide
  misc_feature 1..20: note = Target: ANGPTL3; (+) strand; PAM type: YTN; PAM sequence: CTC
  source 1..20: mol_type = other DNA
aaagcctttgcccttgttgt

SEQ ID NO: 14900 - DNA, 20 bp, synthetic construct
  misc_feature 1..20: note = Description of Artificial Sequence: Synthetic oligonucleotide
  misc_feature 1..20: note = Target: ANGPTL3; (+) strand; PAM type: YTN; PAM sequence: CTT
  source 1..20: mol_type = other DNA
tgcccttgttgtttcctcta

SEQ ID NO: 14901 - DNA, 20 bp, synthetic construct
  misc_feature 1..20: note = Description of Artificial Sequence: Synthetic oligonucleotide
  misc_feature 1..20: note = Target: ANGPTL3; (+) strand; PAM type: YTN; PAM sequence: TTT
  source 1..20: mol_type = other DNA
gcccttgttgtttcctctaa

SEQ ID NO: 14902 - DNA, 20 bp, synthetic construct
  misc_feature 1..20: note = Description of Artificial Sequence: Synthetic oligonucleotide
  misc_feature 1..20: note = Target: ANGPTL3; (+) strand; PAM type: YTN; PAM sequence: TTG
  source 1..20: mol_type = other DNA
cccttgttgtttcctctaac

SEQ ID NO: 14903 - DNA, 20 bp, synthetic construct
  misc_feature 1..20: note = Description of Artificial Sequence: Synthetic oligonucleotide
  misc_feature 1..20: note = Target: ANGPTL3; (+) strand; PAM type: YTN; PAM sequence: CTT
  source 1..20: mol_type = other DNA
gttgtttcctctaactggaa

SEQ ID NO: 14904 - DNA, 20 bp, synthetic construct
  misc_feature 1..20: note = Description of Artificial Sequence: Synthetic oligonucleotide
  misc_feature 1..20: note = Target: ANGPTL3; (+) strand; PAM type: YTN; PAM sequence: TTG
  source 1..20: mol_type = other DNA
ttgtttcctctaactggaac

SEQ ID NO: 14905 - DNA, 20 bp, synthetic construct
  misc_feature 1..20: note = Description of Artificial Sequence: Synthetic oligonucleotide
  misc_feature 1..20: note = Target: ANGPTL3; (+) strand; PAM type: YTN; PAM sequence: TTG
  source 1..20: mol_type = other DNA
tttcctctaactggaacgct

SEQ ID NO: 14906 - DNA, 20 bp, synthetic construct
  misc_feature 1..20: note = Description of Artificial Sequence: Synthetic oligonucleotide
  misc_feature 1..20: note = Target: ANGPTL3; (+) strand; PAM type: YTN; PAM sequence: TTT
  source 1..20: mol_type = other DNA
cctctaactggaacgctctt

SEQ ID NO: 14907 - DNA, 20 bp, synthetic construct
  misc_feature 1..20: note = Description of Artificial Sequence: Synthetic oligonucleotide
  misc_feature 1..20: note = Target: ANGPTL3; (+) strand; PAM type: YTN; PAM sequence: TTC
  source 1..20: mol_type = other DNA
ctctaactggaacgctcttc

SEQ ID NO: 14908 - DNA, 20 bp, synthetic construct
  misc_feature 1..20: note = Description of Artificial Sequence: Synthetic oligonucleotide
  misc_feature 1..20: note = Target: ANGPTL3; (+) strand; PAM type: YTN; PAM sequence: CTC
  source 1..20: mol_type = other DNA
taactggaacgctcttctgc

SEQ ID NO: 14909 - DNA, 20 bp, synthetic construct
  misc_feature 1..20: note = Description of Artificial Sequence: Synthetic oligonucleotide
  misc_feature 1..20: note = Target: ANGPTL3; (+) strand; PAM type: YTN; PAM sequence: CTA
  source 1..20: mol_type = other DNA
actggaacgctcttctgccc

SEQ ID NO: 14910 - DNA, 20 bp, synthetic construct
  misc_feature 1..20: note = Description of Artificial Sequence: Synthetic oligonucleotide
  misc_feature 1..20: note = Target: ANGPTL3; (+) strand; PAM type: YTN; PAM sequence: CTG
  source 1..20: mol_type = other DNA
gaacgctcttctgccctggt

SEQ ID NO: 14911 - DNA, 20 bp, synthetic construct
  misc_feature 1..20: note = Description of Artificial Sequence: Synthetic oligonucleotide
  misc_feature 1..20: note = Target: ANGPTL3; (+) strand; PAM type: YTN; PAM sequence: CTC
  source 1..20: mol_type = other DNA
ttctgccctggtatctacgt

SEQ ID NO: 14912 - DNA, 20 bp, synthetic construct
  misc_feature 1..20: note = Description of Artificial Sequence: Synthetic oligonucleotide
  misc_feature 1..20: note = Target: ANGPTL3; (+) strand; PAM type: YTN; PAM sequence: CTT
  source 1..20: mol_type = other DNA
ctgccctggtatctacgtgg

SEQ ID NO: 14913 - DNA, 20 bp, synthetic construct
  misc_feature 1..20: note = Description of Artificial Sequence: Synthetic oligonucleotide
  misc_feature 1..20: note = Target: ANGPTL3; (+) strand; PAM type: YTN; PAM sequence: TTC
  source 1..20: mol_type = other DNA
tgccctggtatctacgtggc

SEQ ID NO: 14914 - DNA, 20 bp, synthetic construct
  misc_feature 1..20: note = Description of Artificial Sequence: Synthetic oligonucleotide
  misc_feature 1..20: note = Target: ANGPTL3; (+) strand; PAM type: YTN; PAM sequence: CTG
  source 1..20: mol_type = other DNA
ccctggtatctacgtggccc

SEQ ID NO: 14915 - DNA, 20 bp, synthetic construct
  misc_feature 1..20: note = Description of Artificial Sequence: Synthetic oligonucleotide
  misc_feature 1..20: note = Target: ANGPTL3; (+) strand; PAM type: YTN; PAM sequence: CTG
  source 1..20: mol_type = other DNA
gtatctacgtggcccactct

SEQ ID NO: 14916 - DNA, 20 bp, synthetic construct
  misc_feature 1..20: note = Description of Artificial Sequence: Synthetic oligonucleotide
  misc_feature 1..20: note = Target: ANGPTL3; (+) strand; PAM type: YTN; PAM sequence: CTA
  source 1..20: mol_type = other DNA
cgtggcccactctctgattt

SEQ ID NO: 14917 - DNA, 20 bp, synthetic construct
  misc_feature 1..20: note = Description of Artificial Sequence: Synthetic oligonucleotide
  misc_feature 1..20: note = Target: ANGPTL3; (+) strand; PAM type: YTN; PAM sequence: CTC
  source 1..20: mol_type = other DNA
tctgatttcccttagggtcg

SEQ ID NO: 14918 - DNA, 20 bp, synthetic construct
  misc_feature 1..20: note = Description of Artificial Sequence: Synthetic oligonucleotide
  misc_feature 1..20: note = Target: ANGPTL3; (+) strand; PAM type: YTN; PAM sequence: CTC
  source 1..20: mol_type = other DNA
tgatttcccttagggtcgtt

SEQ ID NO: 14919 - DNA, 20 bp, synthetic construct
  misc_feature 1..20: note = Description of Artificial Sequence: Synthetic oligonucleotide
  misc_feature 1..20: note = Target: ANGPTL3; (+) strand; PAM type: YTN; PAM sequence: CTG
  source 1..20: mol_type = other DNA
atttcccttagggtcgttat

SEQ ID NO: 14920 - DNA, 20 bp, synthetic construct
  misc_feature 1..20: note = Description of Artificial Sequence: Synthetic oligonucleotide
  misc_feature 1..20: note = Target: ANGPTL3; (+) strand; PAM type: YTN; PAM sequence: TTT
  source 1..20: mol_type = other DNA
cccttagggtcgttatcaaa

SEQ ID NO: 14921 - DNA, 20 bp, synthetic construct
  misc_feature 1..20: note = Description of Artificial Sequence: Synthetic oligonucleotide
  misc_feature 1..20: note = Target: ANGPTL3; (+) strand; PAM type: YTN; PAM sequence: TTC
  source 1..20: mol_type = other DNA
ccttagggtcgttatcaaac

SEQ ID NO: 14922 - DNA, 20 bp, synthetic construct
  misc_feature 1..20: note = Description of Artificial Sequence: Synthetic oligonucleotide
  misc_feature 1..20: note = Target: ANGPTL3; (+) strand; PAM type: YTN; PAM sequence: CTT
  source 1..20: mol_type = other DNA
agggtcgttatcaaacaaaa

SEQ ID NO: 14923 - DNA, 20 bp, synthetic construct
  misc_feature 1..20: note = Description of Artificial Sequence: Synthetic oligonucleotide
  misc_feature 1..20: note = Target: ANGPTL3; (+) strand; PAM type: YTN; PAM sequence: TTA
  source 1..20: mol_type = other DNA
gggtcgttatcaaacaaaaa

SEQ ID NO: 14924 - DNA, 20 bp, synthetic construct
  misc_feature 1..20: note = Description of Artificial Sequence: Synthetic oligonucleotide
  misc_feature 1..20: note = Target: ANGPTL3; (+) strand; PAM type: YTN; PAM sequence: TTA
  source 1..20: mol_type = other DNA
tcaaacaaaaaattcccaat

SEQ ID NO: 14925 - DNA, 20 bp, synthetic construct
  misc_feature 1..20: note = Description of Artificial Sequence: Synthetic oligonucleotide
  misc_feature 1..20: note = Target: ANGPTL3; (+) strand; PAM type: YTN; PAM sequence: TTC
  source 1..20: mol_type = other DNA
ccaatgaagacttacaaggt

SEQ ID NO: 14926 - DNA, 20 bp, synthetic construct
  misc_feature 1..20: note = Description of Artificial Sequence: Synthetic oligonucleotide
  misc_feature 1..20: note = Target: ANGPTL3; (+) strand; PAM type: YTN; PAM sequence: CTT
  source 1..20: mol_type = other DNA
acaaggtcacttaaccaaaa

SEQ ID NO: 14927 - DNA, 20 bp, synthetic construct
  misc_feature 1..20: note = Description of Artificial Sequence: Synthetic oligonucleotide
  misc_feature 1..20: note = Target: ANGPTL3; (+) strand; PAM type: YTN; PAM sequence: TTA
  source 1..20: mol_type = other DNA
caaggtcacttaaccaaaaa

SEQ ID NO: 14928 - DNA, 20 bp, synthetic construct
  misc_feature 1..20: note = Description of Artificial Sequence: Synthetic oligonucleotide
  misc_feature 1..20: note = Target: ANGPTL3; (+) strand; PAM type: YTN; PAM sequence: CTT
  source 1..20: mol_type = other DNA
aaccaaaaatcacaaccgcc

SEQ ID NO: 14929 - DNA, 20 bp, synthetic construct
  misc_feature 1..20: note = Description of Artificial Sequence: Synthetic oligonucleotide
  misc_feature 1..20: note = Target: ANGPTL3; (+) strand; PAM type: YTN; PAM sequence: TTA
  source 1..20: mol_type = other DNA
accaaaaatcacaaccgcct

SEQ ID NO: 14930 - DNA, 20 bp, synthetic construct
  misc_feature 1..20: note = Description of Artificial Sequence: Synthetic oligonucleotide
  misc_feature 1..20: note = Target: ANGPTL3; (+) strand; PAM type: YTN; PAM sequence: CTG
  source 1..20: mol_type = other DNA
gtcccatccctgaaaacttc

SEQ ID NO: 14931 - DNA, 20 bp, synthetic construct
  misc_feature 1..20: note = Description of Artificial Sequence: Synthetic oligonucleotide
  misc_feature 1..20: note = Target: ANGPTL3; (+) strand; PAM type: YTN; PAM sequence: CTG
  source 1..20: mol_type = other DNA
aaaacttctacttccttagc

SEQ ID NO: 14932 - DNA, 20 bp, synthetic construct
  misc_feature 1..20: note = Description of Artificial Sequence: Synthetic oligonucleotide
  misc_feature 1..20: note = Target: ANGPTL3; (+) strand; PAM type: YTN; PAM sequence: CTT
  source 1..20: mol_type = other DNA
ctacttccttagctactttt

SEQ ID NO: 14933 - DNA, 20 bp, synthetic construct
  misc_feature 1..20: note = Description of Artificial Sequence: Synthetic oligonucleotide
  misc_feature 1..20: note = Target: ANGPTL3; (+) strand; PAM type: YTN; PAM sequence: TTC
  source 1..20: mol_type = other DNA
tacttccttagctacttttc

SEQ ID NO: 14934 - DNA, 20 bp, synthetic construct
  misc_feature 1..20: note = Description of Artificial Sequence: Synthetic oligonucleotide
  misc_feature 1..20: note = Target: ANGPTL3; (+) strand; PAM type: YTN; PAM sequence: CTA
  source 1..20: mol_type = other DNA
cttccttagctacttttctc

SEQ ID NO: 14935 - DNA, 20 bp, synthetic construct
  misc_feature 1..20: note = Description of Artificial Sequence: Synthetic oligonucleotide
  misc_feature 1..20: note = Target: ANGPTL3; (+) strand; PAM type: YTN; PAM sequence: CTT
  source 1..20: mol_type = other DNA
ccttagctacttttctcctg

SEQ ID NO: 14936 - DNA, 20 bp, synthetic construct
  misc_feature 1..20: note = Description of Artificial Sequence: Synthetic oligonucleotide
  misc_feature 1..20: note = Target: ANGPTL3; (+) strand; PAM type: YTN; PAM sequence: TTC
  source 1..20: mol_type = other DNA
cttagctacttttctcctgc

SEQ ID NO: 14937 - DNA, 20 bp, synthetic construct
  misc_feature 1..20: note = Description of Artificial Sequence: Synthetic oligonucleotide
  misc_feature 1..20: note = Target: ANGPTL3; (+) strand; PAM type: YTN; PAM sequence: CTT
  source 1..20: mol_type = other DNA
agctacttttctcctgcaca

SEQ ID NO: 14938 - DNA, 20 bp, synthetic construct
  misc_feature 1..20: note = Description of Artificial Sequence: Synthetic oligonucleotide
  misc_feature 1..20: note = Target: ANGPTL3; (+) strand; PAM type: YTN; PAM sequence: TTA
  source 1..20: mol_type = other DNA
gctacttttctcctgcacac

SEQ ID NO: 14939 - DNA, 20 bp, synthetic construct
  misc_feature 1..20: note = Description of Artificial Sequence: Synthetic oligonucleotide
  misc_feature 1..20: note = Target: ANGPTL3; (+) strand; PAM type: YTN; PAM sequence: CTA
  source 1..20: mol_type = other DNA
cttttctcctgcacactcac

SEQ ID NO: 14940 - DNA, 20 bp, synthetic construct
  misc_feature 1..20: note = Description of Artificial Sequence: Synthetic oligonucleotide
  misc_feature 1..20: note = Target: ANGPTL3; (+) strand; PAM type: YTN; PAM sequence: CTT
  source 1..20: mol_type = other DNA
ttctcctgcacactcacctt

SEQ ID NO: 14941 - DNA, 20 bp, synthetic construct
  misc_feature 1..20: note = Description of Artificial Sequence: Synthetic oligonucleotide
  misc_feature 1..20: note = Target: ANGPTL3; (+) strand; PAM type: YTN; PAM sequence: TTT
  source 1..20: mol_type = other DNA
tctcctgcacactcaccttt

SEQ ID NO: 14942 - DNA, 20 bp, synthetic construct
  misc_feature 1..20: note = Description of Artificial Sequence: Synthetic oligonucleotide
  misc_feature 1..20: note = Target: ANGPTL3; (+) strand; PAM type: YTN; PAM sequence: TTT
  source 1..20: mol_type = other DNA
ctcctgcacactcaccttta

SEQ ID NO: 14943 - DNA, 20 bp, synthetic construct
  misc_feature 1..20: note = Description of Artificial Sequence: Synthetic oligonucleotide
  misc_feature 1..20: note = Target: ANGPTL3; (+) strand; PAM type: YTN; PAM sequence: TTC
  source 1..20: mol_type = other DNA
tcctgcacactcacctttat

SEQ ID NO: 14944 - DNA, 20 bp, synthetic construct
  misc_feature 1..20: note = Description of Artificial Sequence: Synthetic oligonucleotide
  misc_feature 1..20: note = Target: ANGPTL3; (+) strand; PAM type: YTN; PAM sequence: CTC
  source 1..20: mol_type = other DNA
ctgcacactcacctttattt

SEQ ID NO: 14945 - DNA, 20 bp, synthetic construct
  misc_feature 1..20: note = Description of Artificial Sequence: Synthetic oligonucleotide
  misc_feature 1..20: note = Target: ANGPTL3; (+) strand; PAM type: YTN; PAM sequence: CTG
  source 1..20: mol_type = other DNA
cacactcacctttatttaac

SEQ ID NO: 14946 - DNA, 20 bp, synthetic construct
  misc_feature 1..20: note = Description of Artificial Sequence: Synthetic oligonucleotide
  misc_feature 1..20: note = Target: ANGPTL3; (+) strand; PAM type: YTN; PAM sequence: CTC
  source 1..20: mol_type = other DNA
acctttatttaacataacat

SEQ ID NO: 14947 - DNA, 20 bp, synthetic construct
  misc_feature 1..20: note = Description of Artificial Sequence: Synthetic oligonucleotide
  misc_feature 1..20: note = Target: ANGPTL3; (+) strand; PAM type: YTN; PAM sequence: CTT
  source 1..20: mol_type = other DNA
tatttaacataacataaatt

SEQ ID NO: 14948 - DNA, 20 bp, synthetic construct
  misc_feature 1..20: note = Description of Artificial Sequence: Synthetic oligonucleotide
  misc_feature 1..20: note = Target: ANGPTL3; (+) strand; PAM type: YTN; PAM sequence: TTT
  source 1..20: mol_type = other DNA
atttaacataacataaattt

SEQ ID NO: 14949 - DNA, 20 bp, synthetic construct
  misc_feature 1..20: note = Description of Artificial Sequence: Synthetic oligonucleotide
  misc_feature 1..20: note = Target: ANGPTL3; (+) strand; PAM type: YTN; PAM sequence: TTA
  source 1..20: mol_type = other DNA
tttaacataacataaatttt

SEQ ID NO: 14950 - DNA, 20 bp, synthetic construct
  misc_feature 1..20: note = Description of Artificial Sequence: Synthetic oligonucleotide
  misc_feature 1..20: note = Target: ANGPTL3; (+) strand; PAM type: YTN; PAM sequence: TTT
  source 1..20: mol_type = other DNA
aacataacataaattttagt

SEQ ID NO: 14951 - DNA, 20 bp, synthetic construct
  misc_feature 1..20: note = Description of Artificial Sequence: Synthetic oligonucleotide
  misc_feature 1..20: note = Target: ANGPTL3; (+) strand; PAM type: YTN; PAM sequence: TTA
  source 1..20: mol_type = other DNA
acataacataaattttagtt

SEQ ID NO: 14952 - DNA, 20 bp, synthetic construct
  misc_feature 1..20: note = Description of Artificial Sequence: Synthetic oligonucleotide
  misc_feature 1..20: note = Target: ANGPTL3; (+) strand; PAM type: YTN; PAM sequence: TTT
  source 1..20: mol_type = other DNA
tagttatttatctcttctat

SEQ ID NO: 14953 - DNA, 20 bp, synthetic construct
  misc_feature 1..20: note = Description of Artificial Sequence: Synthetic oligonucleotide
  misc_feature 1..20: note = Target: ANGPTL3; (+) strand; PAM type: YTN; PAM sequence: TTT
  source 1..20: mol_type = other DNA
agttatttatctcttctatt

SEQ ID NO: 14954 - DNA, 20 bp, synthetic construct
  misc_feature 1..20: note = Description of Artificial Sequence: Synthetic oligonucleotide
  misc_feature 1..20: note = Target: ANGPTL3; (+) strand; PAM type: YTN; PAM sequence: TTA
  source 1..20: mol_type = other DNA
gttatttatctcttctattc

SEQ ID NO: 14955 - DNA, 20 bp, synthetic construct
  misc_feature 1..20: note = Description of Artificial Sequence: Synthetic oligonucleotide
  misc_feature 1..20: note = Target: ANGPTL3; (+) strand; PAM type: YTN; PAM sequence: TTA
  source 1..20: mol_type = other DNA
tttatctcttctattcctgc

SEQ ID NO: 14956 - DNA, 20 bp, synthetic construct
  misc_feature 1..20: note = Description of Artificial Sequence: Synthetic oligonucleotide
  misc_feature 1..20: note = Target: ANGPTL3; (+) strand; PAM type: YTN; PAM sequence: TTT
  source 1..20: mol_type = other DNA
atctcttctattcctgcact

SEQ ID NO: 14957 - DNA, 20 bp, synthetic construct
  misc_feature 1..20: note = Description of Artificial Sequence: Synthetic oligonucleotide
  misc_feature 1..20: note = Target: ANGPTL3; (+) strand; PAM type: YTN; PAM sequence: TTA
  source 1..20: mol_type = other DNA
tctcttctattcctgcacta

SEQ ID NO: 14958 - DNA, 20 bp, synthetic construct
  misc_feature 1..20: note = Description of Artificial Sequence: Synthetic oligonucleotide
  misc_feature 1..20: note = Target: ANGPTL3; (+) strand; PAM type: YTN; PAM sequence: CTC
  source 1..20: mol_type = other DNA
ttctattcctgcactaaaat

SEQ ID NO: 14959 - DNA, 20 bp, synthetic construct
  misc_feature 1..20: note = Description of Artificial Sequence: Synthetic oligonucleotide
  misc_feature 1..20: note = Target: ANGPTL3; (+) strand; PAM type: YTN; PAM sequence: CTT
  source 1..20: mol_type = other DNA
ctattcctgcactaaaatgt

SEQ ID NO: 14960 - DNA, 20 bp, synthetic construct
  misc_feature 1..20: note = Description of Artificial Sequence: Synthetic oligonucleotide
  misc_feature 1..20: note = Target: ANGPTL3; (+) strand; PAM type: YTN; PAM sequence: TTC
  source 1..20: mol_type = other DNA
tattcctgcactaaaatgta

SEQ ID NO: 14961 - DNA, 20 bp, synthetic construct
  misc_feature 1..20: note = Description of Artificial Sequence: Synthetic oligonucleotide
  misc_feature 1..20: note = Target: ANGPTL3; (+) strand; PAM type: YTN; PAM sequence: CTA
  source 1..20: mol_type = other DNA
ttcctgcactaaaatgtaag

SEQ ID NO: 14962 - DNA, 20 bp, synthetic construct
  misc_feature 1..20: note = Description of Artificial Sequence: Synthetic oligonucleotide
  misc_feature 1..20: note = Target: ANGPTL3; (+) strand; PAM type: YTN; PAM sequence: TTC
  source 1..20: mol_type = other DNA
ctgcactaaaatgtaagctc

SEQ ID NO: 14963 - DNA, 20 bp, synthetic construct
  misc_feature 1..20: note = Description of Artificial Sequence: Synthetic oligonucleotide
  misc_feature 1..20: note = Target: ANGPTL3; (+) strand; PAM type: YTN; PAM sequence: CTG
  source 1..20: mol_type = other DNA
cactaaaatgtaagctctgt

SEQ ID NO: 14964 - DNA, 20 bp, synthetic construct
  misc_feature 1..20: note = Description of Artificial Sequence: Synthetic oligonucleotide
  misc_feature 1..20: note = Target: ANGPTL3; (+) strand; PAM type: YTN; PAM sequence: CTA
  source 1..20: mol_type = other DNA
aaatgtaagctctgtgaata

SEQ ID NO: 14965 - DNA, 20 bp, synthetic construct
  misc_feature 1..20: note = Description of Artificial Sequence: Synthetic oligonucleotide
  misc_feature 1..20: note = Target: ANGPTL3; (+) strand; PAM type: YTN; PAM sequence: CTC
  source 1..20: mol_type = other DNA
tgtgaatacagggatttttt

SEQ ID NO: 14966 - DNA, 20 bp, synthetic construct
  misc_feature 1..20: note = Description of Artificial Sequence: Synthetic oligonucleotide
  misc_feature 1..20: note = Target: ANGPTL3; (+) strand; PAM type: YTN; PAM sequence: CTG
  source 1..20: mol_type = other DNA
tgaatacagggattttttcc

SEQ ID NO: 14967 - DNA, 20 bp, synthetic construct
  misc_feature 1..20: note = Description of Artificial Sequence: Synthetic oligonucleotide
  misc_feature 1..20: note = Target: ANGPTL3; (+) strand; PAM type: YTN; PAM sequence: TTT
  source 1..20: mol_type = other DNA
tttccattatcttcatattt

SEQ ID NO: 14968 - DNA, 20 bp, synthetic construct
  misc_feature 1..20: note = Description of Artificial Sequence: Synthetic oligonucleotide
  misc_feature 1..20: note = Target: ANGPTL3; (+) strand; PAM type: YTN; PAM sequence: TTT
  source 1..20: mol_type = other DNA
ttccattatcttcatatttt

SEQ ID NO: 14969 - DNA, 20 bp, synthetic construct
  misc_feature 1..20: note = Description of Artificial Sequence: Synthetic oligonucleotide
  misc_feature 1..20: note = Target: ANGPTL3; (+) strand; PAM type: YTN; PAM sequence: TTT
  source 1..20: mol_type = other DNA
tccattatcttcatattttc

SEQ ID NO: 14970 - DNA, 20 bp, synthetic construct
  misc_feature 1..20: note = Description of Artificial Sequence: Synthetic oligonucleotide
  misc_feature 1..20: note = Target: ANGPTL3; (+) strand; PAM type: YTN; PAM sequence: TTT
  source 1..20: mol_type = other DNA
ccattatcttcatattttcc

SEQ ID NO: 14971 - DNA, 20 bp, synthetic construct
  misc_feature 1..20: note = Description of Artificial Sequence: Synthetic oligonucleotide
  misc_feature 1..20: note = Target: ANGPTL3; (+) strand; PAM type: YTN; PAM sequence: TTC
  source 1..20: mol_type = other DNA
cattatcttcatattttcca

SEQ ID NO: 14972 - DNA, 20 bp, synthetic construct
  misc_feature 1..20: note = Description of Artificial Sequence: Synthetic oligonucleotide
  misc_feature 1..20: note = Target: ANGPTL3; (+) strand; PAM type: YTN; PAM sequence: TTA
  source 1..20: mol_type = other DNA
tcttcatattttccattatt

SEQ ID NO: 14973 - DNA, 20 bp, synthetic construct
  misc_feature 1..20: note = Description of Artificial Sequence: Synthetic oligonucleotide
  misc_feature 1..20: note = Target: ANGPTL3; (+) strand; PAM type: YTN; PAM sequence: CTT
  source 1..20: mol_type = other DNA
catattttccattatttgta

SEQ ID NO: 14974 - DNA, 20 bp, synthetic construct
  misc_feature 1..20: note = Description of Artificial Sequence: Synthetic oligonucleotide
  misc_feature 1..20: note = Target: ANGPTL3; (+) strand; PAM type: YTN; PAM sequence: TTC
  source 1..20: mol_type = other DNA
atattttccattatttgtat

SEQ ID NO: 14975 - DNA, 20 bp, synthetic construct
  misc_feature 1..20: note = Description of Artificial Sequence: Synthetic oligonucleotide
  misc_feature 1..20: note = Target: ANGPTL3; (+) strand; PAM type: YTN; PAM sequence: TTT
  source 1..20: mol_type = other DNA
tccattatttgtatatactc

SEQ ID NO: 14976 - DNA, 20 bp, synthetic construct
  misc_feature 1..20: note = Description of Artificial Sequence: Synthetic oligonucleotide
  misc_feature 1..20: note = Target: ANGPTL3; (+) strand; PAM type: YTN; PAM sequence: TTT
  source 1..20: mol_type = other DNA
ccattatttgtatatactcc

SEQ ID NO: 14977 - DNA, 20 bp, synthetic construct
  misc_feature 1..20: note = Description of Artificial Sequence: Synthetic oligonucleotide
  misc_feature 1..20: note = Target: ANGPTL3; (+) strand; PAM type: YTN; PAM sequence: TTC
  source 1..20: mol_type = other DNA
cattatttgtatatactcca

SEQ ID NO: 14978 - DNA, 20 bp, synthetic construct
  misc_feature 1..20: note = Description of Artificial Sequence: Synthetic oligonucleotide
  misc_feature 1..20: note = Target: ANGPTL3; (+) strand; PAM type: YTN; PAM sequence: TTA
  source 1..20: mol_type = other DNA
tttgtatatactccagaata

SEQ ID NO: 14979 - DNA, 20 bp, synthetic construct
  misc_feature 1..20: note = Description of Artificial Sequence: Synthetic oligonucleotide
  misc_feature 1..20: note = Target: ANGPTL3; (+) strand; PAM type: YTN; PAM sequence: TTT
  source 1..20: mol_type = other DNA
gtatatactccagaatatag

SEQ ID NO: 14980 - DNA, 20 bp, synthetic construct
  misc_feature 1..20: note = Description of Artificial Sequence: Synthetic oligonucleotide
  misc_feature 1..20: note = Target: ANGPTL3; (+) strand; PAM type: YTN; PAM sequence: TTG
  source 1..20: mol_type = other DNA
tatatactccagaatataga

SEQ ID NO: 14981 - DNA, 20 bp, synthetic construct
  misc_feature 1..20: note = Description of Artificial Sequence: Synthetic oligonucleotide
  misc_feature 1..20: note = Target: ANGPTL3; (+) strand; PAM type: YTN; PAM sequence: CTC
  source 1..20: mol_type = other DNA
cagaatatagaatactgtat

SEQ ID NO: 14982 - DNA, 20 bp, synthetic construct
  misc_feature 1..20: note = Description of Artificial Sequence: Synthetic oligonucleotide
  misc_feature 1..20: note = Target: ANGPTL3; (+) strand; PAM type: YTN; PAM sequence: CTG
  source 1..20: mol_type = other DNA
tatggcacacagtaggcatt

SEQ ID NO: 14983 - DNA, 20 bp, synthetic construct
  misc_feature 1..20: note = Description of Artificial Sequence: Synthetic oligonucleotide
  misc_feature 1..20: note = Target: ANGPTL3; (+) strand; PAM type: YTN; PAM sequence: TTT
  source 1..20: mol_type = other DNA
ctgttgaattaataaatgta

SEQ ID NO: 14984 - DNA, 20 bp, synthetic construct
  misc_feature 1..20: note = Description of Artificial Sequence: Synthetic oligonucleotide
  misc_feature 1..20: note = Target: ANGPTL3; (+) strand; PAM type: YTN; PAM sequence: TTC
  source 1..20: mol_type = other DNA
tgttgaattaataaatgtaa

SEQ ID NO: 14985 - DNA, 20 bp, synthetic construct
  misc_feature 1..20: note = Description of Artificial Sequence: Synthetic oligonucleotide
  misc_feature 1..20: note = Target: ANGPTL3; (+) strand; PAM type: YTN; PAM sequence: CTG
  source 1..20: mol_type = other DNA
ttgaattaataaatgtaatg

SEQ ID NO: 14986 - DNA, 20 bp, synthetic construct
  misc_feature 1..20: note = Description of Artificial Sequence: Synthetic oligonucleotide
  misc_feature 1..20: note = Target: ANGPTL3; (+) strand; PAM type: YTN; PAM sequence: TTG
  source 1..20: mol_type = other DNA
aattaataaatgtaatgtca

SEQ ID NO: 14987 - DNA, 20 bp, synthetic construct
  misc_feature 1..20: note = Description of Artificial Sequence: Synthetic oligonucleotide
  misc_feature 1..20: note = Target: ANGPTL3; (+) strand; PAM type: YTN; PAM sequence: TTA
  source 1..20: mol_type = other DNA
ataaatgtaatgtcatattc

SEQ ID NO: 14988 - DNA, 20 bp, synthetic construct
  misc_feature 1..20: note = Description of Artificial Sequence: Synthetic oligonucleotide
  misc_feature 1..20: note = Target: ANGPTL3; (+) strand; PAM type: YTN; PAM sequence: TTC
  source 1..20: mol_type = other DNA
acacagaagcgtgtgctatg

SEQ ID NO: 14989 - DNA, 20 bp, synthetic construct
  misc_feature 1..20: note = Description of Artificial Sequence: Synthetic oligonucleotide
  misc_feature 1..20: note = Target: ANGPTL3; (+) strand; PAM type: YTN; PAM sequence: CTA
  source 1..20: mol_type = other DNA
tgattattattacttggatt

SEQ ID NO: 14990 - DNA, 20 bp, synthetic construct
  misc_feature 1..20: note = Description of Artificial Sequence: Synthetic oligonucleotide
  misc_feature 1..20: note = Target: ANGPTL3; (+) strand; PAM type: YTN; PAM sequence: TTA
  source 1..20: mol_type = other DNA
ttattacttggattactaga

SEQ ID NO: 14991 - DNA, 20 bp, synthetic construct
  misc_feature 1..20: note = Description of Artificial Sequence: Synthetic oligonucleotide
  misc_feature 1..20: note = Target: ANGPTL3; (+) strand; PAM type: YTN; PAM sequence: TTA
  source 1..20: mol_type = other DNA
ttacttggattactagaaat

SEQ ID NO: 14992 - DNA, 20 bp, synthetic construct
  misc_feature 1..20: note = Description of Artificial Sequence: Synthetic oligonucleotide
  misc_feature 1..20: note = Target: ANGPTL3; (+) strand; PAM type: YTN; PAM sequence: TTA
  source 1..20: mol_type = other DNA
cttggattactagaaatagt

SEQ ID NO: 14993 - DNA, 20 bp, synthetic construct
  misc_feature 1..20: note = Description of Artificial Sequence: Synthetic oligonucleotide
  misc_feature 1..20: note = Target: ANGPTL3; (+) strand; PAM type: YTN; PAM sequence: CTT
  source 1..20: mol_type = other DNA
ggattactagaaatagtgtg

SEQ ID NO: 14994 - DNA, 20 bp, synthetic construct
  misc_feature 1..20: note = Description of Artificial Sequence: Synthetic oligonucleotide
  misc_feature 1..20: note = Target: ANGPTL3; (+) strand; PAM type: YTN; PAM sequence: TTG
  source 1..20: mol_type = other DNA
gattactagaaatagtgtgc

SEQ ID NO: 14995 - DNA, 20 bp, synthetic construct
  misc_feature 1..20: note = Description of Artificial Sequence: Synthetic oligonucleotide
  misc_feature 1..20: note = Target: ANGPTL3; (+) strand; PAM type: YTN; PAM sequence: TTA
  source 1..20: mol_type = other DNA
ctagaaatagtgtgcctcat

SEQ ID NO: 14996 - DNA, 20 bp, synthetic construct
  misc_feature 1..20: note = Description of Artificial Sequence: Synthetic oligonucleotide
  misc_feature 1..20: note = Target: ANGPTL3; (+) strand; PAM type: YTN; PAM sequence: CTA
  source 1..20: mol_type = other DNA
gaaatagtgtgcctcataat

SEQ ID NO: 14997 - DNA, 20 bp, synthetic construct
  misc_feature 1..20: note = Description of Artificial Sequence: Synthetic oligonucleotide
  misc_feature 1..20: note = Target: ANGPTL3; (+) strand; PAM type: YTN; PAM sequence: CTC
  source 1..20: mol_type = other DNA
ataattaaaggtcaacattc

SEQ ID NO: 14998 - DNA, 20 bp, synthetic construct
  misc_feature 1..20: note = Description of Artificial Sequence: Synthetic oligonucleotide
  misc_feature 1..20: note = Target: ANGPTL3; (+) strand; PAM type: YTN; PAM sequence: TTA
  source 1..20: mol_type = other DNA
aaggtcaacattcaacaatg

SEQ ID NO: 14999 - DNA, 20 bp, synthetic construct
  misc_feature 1..20: note = Description of Artificial Sequence: Synthetic oligonucleotide
  misc_feature 1..20: note = Target: ANGPTL3; (+) strand; PAM type: YTN; PAM sequence: TTC
  source 1..20: mol_type = other DNA
aacaatgtaattaatctaca

SEQ ID NO: 15000 - DNA, 20 bp, synthetic construct
  misc_feature 1..20: note = Description of Artificial Sequence: Synthetic oligonucleotide
  misc_feature 1..20: note = Target: ANGPTL3; (+) strand; PAM type: YTN; PAM sequence: TTA
  source 1..20: mol_type = other DNA
atctacaatgtaaacatctg

SEQ ID NO: 15001 - DNA, 20 bp, synthetic construct
  misc_feature 1..20: note = Description of Artificial Sequence: Synthetic oligonucleotide
  misc_feature 1..20: note = Target: ANGPTL3; (+) strand; PAM type: YTN; PAM sequence: CTA
  source 1..20: mol_type = other DNA
caatgtaaacatctggtgaa

SEQ ID NO: 15002 - DNA, 20 bp, synthetic construct
  misc_feature 1..20: note = Description of Artificial Sequence: Synthetic oligonucleotide
  misc_feature 1..20: note = Target: ANGPTL3; (+) strand; PAM type: YTN; PAM sequence: CTG
  source 1..20: mol_type = other DNA
gtgaagtgacagagggaagc

SEQ ID NO: 15003 - DNA, 20 bp, synthetic construct
  misc_feature 1..20: note = Description of Artificial Sequence: Synthetic oligonucleotide
  misc_feature 1..20: note = Target: ANGPTL3; (+) strand; PAM type: YTN; PAM sequence: CTT
  source 1..20: mol_type = other DNA
gtttagaaaaaagctatgtc

SEQ ID NO: 15004 - DNA, 20 bp, synthetic construct
  misc_feature 1..20: note = Description of Artificial Sequence: Synthetic oligonucleotide
  misc_feature 1..20: note = Target: ANGPTL3; (+) strand; PAM type: YTN; PAM sequence: TTG
  source 1..20: mol_type = other DNA
tttagaaaaaagctatgtca

SEQ ID NO: 15005 - DNA, 20 bp, synthetic construct
  misc_feature 1..20: note = Description of Artificial Sequence: Synthetic oligonucleotide
  misc_feature 1..20: note = Target: ANGPTL3; (+) strand; PAM type: YTN; PAM sequence: TTT
  source 1..20: mol_type = other DNA
agaaaaaagctatgtcagaa

SEQ ID NO: 15006 - DNA, 20 bp, synthetic construct
  misc_feature 1..20: note = Description of Artificial Sequence: Synthetic oligonucleotide
  misc_feature 1..20: note = Target: ANGPTL3; (+) strand; PAM type: YTN; PAM sequence: TTA
  source 1..20: mol_type = other DNA
gaaaaaagctatgtcagaat

SEQ ID NO: 15007 - DNA, 20 bp, synthetic construct
  misc_feature 1..20: note = Description of Artificial Sequence: Synthetic oligonucleotide
  misc_feature 1..20: note = Target: ANGPTL3; (+) strand; PAM type: YTN; PAM sequence: CTA
  source 1..20: mol_type = other DNA
tgtcagaatccatgtattct

SEQ ID NO: 15008 - DNA, 20 bp, synthetic construct
  misc_feature 1..20: note = Description of Artificial Sequence: Synthetic oligonucleotide
  misc_feature 1..20: note = Target: ANGPTL3; (+) strand; PAM type: YTN; PAM sequence: TTC
  source 1..20: mol_type = other DNA
taatatgcagtacaatagtt

SEQ ID NO: 15009 - DNA, 20 bp, synthetic construct
  misc_feature 1..20: note = Description of Artificial Sequence: Synthetic oligonucleotide
  misc_feature 1..20: note = Target: ANGPTL3; (+) strand; PAM type: YTN; PAM sequence: CTA
  source 1..20: mol_type = other DNA
atatgcagtacaatagttta

SEQ ID NO: 15010 - DNA, 20 bp, synthetic construct
  misc_feature 1..20: note = Description of Artificial Sequence: Synthetic oligonucleotide
  misc_feature 1..20: note = Target: ANGPTL3; (+) strand; PAM type: YTN; PAM sequence: TTT
  source 1..20: mol_type = other DNA
aaaaatattaataatactct

SEQ ID NO: 15011 - DNA, 20 bp, synthetic construct
  misc_feature 1..20: note = Description of Artificial Sequence: Synthetic oligonucleotide
  misc_feature 1..20: note = Target: ANGPTL3; (+) strand; PAM type: YTN; PAM sequence: TTA
  source 1..20: mol_type = other DNA
aaaatattaataatactctc

SEQ ID NO: 15012 - DNA, 20 bp, synthetic construct
  misc_feature 1..20: note = Description of Artificial Sequence: Synthetic oligonucleotide
  misc_feature 1..20: note = Target: ANGPTL3; (+) strand; PAM type: YTN; PAM sequence: TTA
  source 1..20: mol_type = other DNA
ataatactctcaaacagcta

SEQ ID NO: 15013 - DNA, 20 bp, synthetic construct
  misc_feature 1..20: note = Description of Artificial Sequence: Synthetic oligonucleotide
  misc_feature 1..20: note = Target: ANGPTL3; (+) strand; PAM type: YTN; PAM sequence: CTC
  source 1..20: mol_type = other DNA
tcaaacagctattcaagagg

SEQ ID NO: 15014 - DNA, 20 bp, synthetic construct
  misc_feature 1..20: note = Description of Artificial Sequence: Synthetic oligonucleotide
  misc_feature 1..20: note = Target: ANGPTL3; (+) strand; PAM type: YTN; PAM sequence: CTC
  source 1..20: mol_type = other DNA
aaacagctattcaagaggat

SEQ ID NO: 15015 - DNA, 20 bp, synthetic construct
  misc_feature 1..20: note = Description of Artificial Sequence: Synthetic oligonucleotide
  misc_feature 1..20: note = Target: ANGPTL3; (+) strand; PAM type: YTN; PAM sequence: CTA
  source 1..20: mol_type = other DNA
ttcaagaggattcaaaaaac

SEQ ID NO: 15016 - DNA, 20 bp, synthetic construct
  misc_feature 1..20: note = Description of Artificial Sequence: Synthetic oligonucleotide
  misc_feature 1..20: note = Target: ANGPTL3; (+) strand; PAM type: YTN; PAM sequence: TTC
  source 1..20: mol_type = other DNA
aagaggattcaaaaaacata

SEQ ID NO: 15017 - DNA, 20 bp, synthetic construct
  misc_feature 1..20: note = Description of Artificial Sequence: Synthetic oligonucleotide
  misc_feature 1..20: note = Target: ANGPTL3; (+) strand; PAM type: YTN; PAM sequence: TTC
  source 1..20: mol_type = other DNA
aaaaaacataatataaactc

SEQ ID NO: 15018 - DNA, 20 bp, synthetic construct
  misc_feature 1..20: note = Description of Artificial Sequence: Synthetic oligonucleotide
  misc_feature 1..20: note = Target: ANGPTL3; (+) strand; PAM type: YTN; PAM sequence: CTC
  source 1..20: mol_type = other DNA
agagaaactggtaaacaaaa

SEQ ID NO: 15019 - DNA, 20 bp, synthetic construct
  misc_feature 1..20: note = Description of Artificial Sequence: Synthetic oligonucleotide
  misc_feature 1..20: note = Target: ANGPTL3; (+) strand; PAM type: YTN; PAM sequence: CTG
  source 1..20: mol_type = other DNA
gtaaacaaaatcattttcaa

SEQ ID NO: 15020 - DNA, 20 bp, synthetic construct
  misc_feature 1..20: note = Description of Artificial Sequence: Synthetic oligonucleotide
  misc_feature 1..20: note = Target: ANGPTL3; (+) strand; PAM type: YTN; PAM sequence: TTT
  source 1..20: mol_type = other DNA
tcaagagatataaaacaaat

SEQ ID NO: 15021 - DNA, 20 bp, synthetic construct
  misc_feature 1..20: note = Description of Artificial Sequence: Synthetic oligonucleotide
  misc_feature 1..20: note = Target: ANGPTL3; (+) strand; PAM type: YTN; PAM sequence: TTT
  source 1..20: mol_type = other DNA
caagagatataaaacaaata

SEQ ID NO: 15022 - DNA, 20 bp, synthetic construct
  misc_feature 1..20: note = Description of Artificial Sequence: Synthetic oligonucleotide
  misc_feature 1..20: note = Target: ANGPTL3; (+) strand; PAM type: YTN; PAM sequence: TTC
  source 1..20: mol_type = other DNA
aagagatataaaacaaatat

SEQ ID NO: 15023 - DNA, 20 bp, synthetic construct
  misc_feature 1..20: note = Description of Artificial Sequence: Synthetic oligonucleotide
  misc_feature 1..20: note = Target: ANGPTL3; (+) strand; PAM type: YTN; PAM sequence: TTA
  source 1..20: mol_type = other DNA
ttaccaatttccactaaaca

SEQ ID NO: 15024 - DNA, 20 bp, synthetic construct
  misc_feature 1..20: note = Description of Artificial Sequence: Synthetic oligonucleotide
  misc_feature 1..20: note = Target: ANGPTL3; (+) strand; PAM type: YTN; PAM sequence: TTA
  source 1..20: mol_type = other DNA
ccaatttccactaaacaaac

SEQ ID NO: 15025 - DNA, 20 bp, synthetic construct
  misc_feature 1..20: note = Description of Artificial Sequence: Synthetic oligonucleotide
  misc_feature 1..20: note = Target: ANGPTL3; (+) strand; PAM type: YTN; PAM sequence: TTT
  source 1..20: mol_type = other DNA
ccactaaacaaacataatgt

SEQ ID NO: 15026 - DNA, 20 bp, synthetic construct
  misc_feature 1..20: note = Description of Artificial Sequence: Synthetic oligonucleotide
  misc_feature 1..20: note = Target: ANGPTL3; (+) strand; PAM type: YTN; PAM sequence: TTC
  source 1..20: mol_type = other DNA
cactaaacaaacataatgtt

SEQ ID NO: 15027 - DNA, 20 bp, synthetic construct
  misc_feature 1..20: note = Description of Artificial Sequence: Synthetic oligonucleotide
  misc_feature 1..20: note = Target: ANGPTL3; (+) strand; PAM type: YTN; PAM sequence: CTA
  source 1..20: mol_type = other DNA
aacaaacataatgttagtag

SEQ ID NO: 15028 - DNA, 20 bp, synthetic construct
  misc_feature 1..20: note = Description of Artificial Sequence: Synthetic oligonucleotide
  misc_feature 1..20: note = Target: ANGPTL3; (+) strand; PAM type: YTN; PAM sequence: TTA
  source 1..20: mol_type = other DNA
gtagtgctgctaaaaggttt

SEQ ID NO: 15029 - DNA, 20 bp, synthetic construct
  misc_feature 1..20: note = Description of Artificial Sequence: Synthetic oligonucleotide
  misc_feature 1..20: note = Target: ANGPTL3; (+) strand; PAM type: YTN; PAM sequence: CTG
  source 1..20: mol_type = other DNA
ctaaaaggttttttatcaac

SEQ ID NO: 15030 - DNA, 20 bp, synthetic construct
  misc_feature 1..20: note = Description of Artificial Sequence: Synthetic oligonucleotide
  misc_feature 1..20: note = Target: ANGPTL3; (+) strand; PAM type: YTN; PAM sequence: CTA
  source 1..20: mol_type = other DNA
aaaggttttttatcaactac

SEQ ID NO: 15031 - DNA, 20 bp, synthetic construct
  misc_feature 1..20: note = Description of Artificial Sequence: Synthetic oligonucleotide
  misc_feature 1..20: note = Target: ANGPTL3; (+) strand; PAM type: YTN; PAM sequence: TTT
  source 1..20: mol_type = other DNA
tttatcaactacttttggtt

SEQ ID NO: 15032 - DNA, 20 bp, synthetic construct
  misc_feature 1..20: note = Description of Artificial Sequence: Synthetic oligonucleotide
  misc_feature 1..20: note = Target: ANGPTL3; (+) strand; PAM type: YTN; PAM sequence: TTT
  source 1..20: mol_type = other DNA
ttatcaactacttttggttt

SEQ ID NO: 15033 - DNA, 20 bp, synthetic construct
  misc_feature 1..20: note = Description of Artificial Sequence: Synthetic oligonucleotide
  misc_feature 1..20: note = Target: ANGPTL3; (+) strand; PAM type: YTN; PAM sequence: TTT
  source 1..20: mol_type = other DNA
tatcaactacttttggtttc

SEQ ID NO: 15034 - DNA, 20 bp, synthetic construct
  misc_feature 1..20: note = Description of Artificial Sequence: Synthetic oligonucleotide
  misc_feature 1..20: note = Target: ANGPTL3; (+) strand; PAM type: YTN; PAM sequence: TTT
  source 1..20: mol_type = other DNA
atcaactacttttggtttcc

SEQ ID NO: 15035 - DNA, 20 bp, synthetic construct
  misc_feature 1..20: note = Description of Artificial Sequence: Synthetic oligonucleotide
  misc_feature 1..20: note = Target: ANGPTL3; (+) strand; PAM type: YTN; PAM sequence: TTA
  source 1..20: mol_type = other DNA
tcaactacttttggtttcca

SEQ ID NO: 15036 - DNA, 20 bp, synthetic construct
  misc_feature 1..20: note = Description of Artificial Sequence: Synthetic oligonucleotide
  misc_feature 1..20: note = Target: ANGPTL3; (+) strand; PAM type: YTN; PAM sequence: CTA
  source 1..20: mol_type = other DNA
cttttggtttccatactttc

SEQ ID NO: 15037 - DNA, 20 bp, synthetic construct
  misc_feature 1..20: note = Description of Artificial Sequence: Synthetic oligonucleotide
  misc_feature 1..20: note = Target: ANGPTL3; (+) strand; PAM type: YTN; PAM sequence: CTT
  source 1..20: mol_type = other DNA
ttggtttccatactttcctt

SEQ ID NO: 15038 - DNA, 20 bp, synthetic construct
  misc_feature 1..20: note = Description of Artificial Sequence: Synthetic oligonucleotide
  misc_feature 1..20: note = Target: ANGPTL3; (+) strand; PAM type: YTN; PAM sequence: TTT
  source 1..20: mol_type = other DNA
tggtttccatactttccttc

SEQ ID NO: 15039 - DNA, 20 bp, synthetic construct
  misc_feature 1..20: note = Description of Artificial Sequence: Synthetic oligonucleotide
  misc_feature 1..20: note = Target: ANGPTL3; (+) strand; PAM type: YTN; PAM sequence: TTT
  source 1..20: mol_type = other DNA
ggtttccatactttccttct

SEQ ID NO: 15040 - DNA, 20 bp, synthetic construct
  misc_feature 1..20: note = Description of Artificial Sequence: Synthetic oligonucleotide
  misc_feature 1..20: note = Target: ANGPTL3; (+) strand; PAM type: YTN; PAM sequence: TTG
  source 1..20: mol_type = other DNA
gtttccatactttccttctt

SEQ ID NO: 15041 - DNA, 20 bp, synthetic construct
  misc_feature 1..20: note = Description of Artificial Sequence: Synthetic oligonucleotide
  misc_feature 1..20: note = Target: ANGPTL3; (+) strand; PAM type: YTN; PAM sequence: TTT
  source 1..20: mol_type = other DNA
ccatactttccttcttatga

SEQ ID NO: 15042 - DNA, 20 bp, synthetic construct
  misc_feature 1..20: note = Description of Artificial Sequence: Synthetic oligonucleotide
  misc_feature 1..20: note = Target: ANGPTL3; (+) strand; PAM type: YTN; PAM sequence: TTC
  source 1..20: mol_type = other DNA
catactttccttcttatgat

SEQ ID NO: 15043 - DNA, 20 bp, synthetic construct
  misc_feature 1..20: note = Description of Artificial Sequence: Synthetic oligonucleotide
  misc_feature 1..20: note = Target: ANGPTL3; (+) strand; PAM type: YTN; PAM sequence: CTT
  source 1..20: mol_type = other DNA
tccttcttatgatgttatta

SEQ ID NO: 15044 - DNA, 20 bp, synthetic construct
  misc_feature 1..20: note = Description of Artificial Sequence: Synthetic oligonucleotide
  misc_feature 1..20: note = Target: ANGPTL3; (+) strand; PAM type: YTN; PAM sequence: TTT
  source 1..20: mol_type = other DNA
ccttcttatgatgttattat

SEQ ID NO: 15045 - DNA, 20 bp, synthetic construct
  misc_feature 1..20: note = Description of Artificial Sequence: Synthetic oligonucleotide
  misc_feature 1..20: note = Target: ANGPTL3; (+) strand; PAM type: YTN; PAM sequence: TTC
  source 1..20: mol_type = other DNA
cttcttatgatgttattatt

SEQ ID NO: 15046 - DNA, 20 bp, synthetic construct
  misc_feature 1..20: note = Description of Artificial Sequence: Synthetic oligonucleotide
  misc_feature 1..20: note = Target: ANGPTL3; (+) strand; PAM type: YTN; PAM sequence: CTT
  source 1..20: mol_type = other DNA
cttatgatgttattattcta

SEQ ID NO: 15047 - DNA, 20 bp, synthetic construct
  misc_feature 1..20: note = Description of Artificial Sequence: Synthetic oligonucleotide
  misc_feature 1..20: note = Target: ANGPTL3; (+) strand; PAM type: YTN; PAM sequence: TTC
  source 1..20: mol_type = other DNA
ttatgatgttattattctaa

SEQ ID NO: 15048 - DNA, 20 bp, synthetic construct
  misc_feature 1..20: note = Description of Artificial Sequence: Synthetic oligonucleotide
  misc_feature 1..20: note = Target: ANGPTL3; (+) strand; PAM type: YTN; PAM sequence: CTT
  source 1..20: mol_type = other DNA
atgatgttattattctaaat

SEQ ID NO: 15049 - DNA, 20 bp, synthetic construct
  misc_feature 1..20: note = Description of Artificial Sequence: Synthetic oligonucleotide
  misc_feature 1..20: note = Target: ANGPTL3; (+) strand; PAM type: YTN; PAM sequence: TTA
  source 1..20: mol_type = other DNA
tgatgttattattctaaatt

SEQ ID NO: 15050 - DNA, 20 bp, synthetic construct
  misc_feature 1..20: note = Description of Artificial Sequence: Synthetic oligonucleotide
  misc_feature 1..20: note = Target: ANGPTL3; (+) strand; PAM type: YTN; PAM sequence: TTA
  source 1..20: mol_type = other DNA
ttattctaaattcttttcaa

SEQ ID NO: 15051 - DNA, 20 bp, synthetic construct
  misc_feature 1..20: note = Description of Artificial Sequence: Synthetic oligonucleotide
  misc_feature 1..20: note = Target: ANGPTL3; (+) strand; PAM type: YTN; PAM sequence: TTA
  source 1..20: mol_type = other DNA
ttctaaattcttttcaatta

SEQ ID NO: 15052 - DNA, 20 bp, synthetic construct
  misc_feature 1..20: note = Description of Artificial Sequence: Synthetic oligonucleotide
  misc_feature 1..20: note = Target: ANGPTL3; (+) strand; PAM type: YTN; PAM sequence: TTC
  source 1..20: mol_type = other DNA
taaattcttttcaattatat

SEQ ID NO: 15053 - DNA, 20 bp, synthetic construct
  misc_feature 1..20: note = Description of Artificial Sequence: Synthetic oligonucleotide
  misc_feature 1..20: note = Target: ANGPTL3; (+) strand; PAM type: YTN; PAM sequence: CTA
  source 1..20: mol_type = other DNA
aattcttttcaattatatct

SEQ ID NO: 15054 - DNA, 20 bp, synthetic construct
  misc_feature 1..20: note = Description of Artificial Sequence: Synthetic oligonucleotide
  misc_feature 1..20: note = Target: ANGPTL3; (+) strand; PAM type: YTN; PAM sequence: TTC
  source 1..20: mol_type = other DNA
ttttcaattatatcttttac

SEQ ID NO: 15055 - DNA, 20 bp, synthetic construct
  misc_feature 1..20: note = Description of Artificial Sequence: Synthetic oligonucleotide
  misc_feature 1..20: note = Target: ANGPTL3; (+) strand; PAM type: YTN; PAM sequence: CTT
  source 1..20: mol_type = other DNA
ttcaattatatcttttacta

SEQ ID NO: 15056 - DNA, 20 bp, synthetic construct
  misc_feature 1..20: note = Description of Artificial Sequence: Synthetic oligonucleotide
  misc_feature 1..20: note = Target: ANGPTL3; (+) strand; PAM type: YTN; PAM sequence: TTT
  source 1..20: mol_type = other DNA
tcaattatatcttttactat

SEQ ID NO: 15057 - DNA, 20 bp, synthetic construct
  misc_feature 1..20: note = Description of Artificial Sequence: Synthetic oligonucleotide
  misc_feature 1..20: note = Target: ANGPTL3; (+) strand; PAM type: YTN; PAM sequence: TTT
  source 1..20: mol_type = other DNA
caattatatcttttactatg

SEQ ID NO: 15058 - DNA, 20 bp, synthetic construct
  misc_feature 1..20: note = Description of Artificial Sequence: Synthetic oligonucleotide
  misc_feature 1..20: note = Target: ANGPTL3; (+) strand; PAM type: YTN; PAM sequence: TTC
  source 1..20: mol_type = other DNA
aattatatcttttactatga

SEQ ID NO: 15059 - DNA, 20 bp, synthetic construct
  misc_feature 1..20: note = Description of Artificial Sequence: Synthetic oligonucleotide
  misc_feature 1..20: note = Target: ANGPTL3; (+) strand; PAM type: YTN; PAM sequence: TTA
  source 1..20: mol_type = other DNA
tatcttttactatgattaaa

SEQ ID NO: 15060 - DNA, 20 bp, synthetic construct
  misc_feature 1..20: note = Description of Artificial Sequence: Synthetic oligonucleotide
  misc_feature 1..20: note = Target: ANGPTL3; (+) strand; PAM type: YTN; PAM sequence: CTT
  source 1..20: mol_type = other DNA
ttactatgattaaatgaacc

SEQ ID NO: 15061 - DNA, 20 bp, synthetic construct
  misc_feature 1..20: note = Description of Artificial Sequence: Synthetic oligonucleotide
  misc_feature 1..20: note = Target: ANGPTL3; (+) strand; PAM type: YTN; PAM sequence: TTT
  source 1..20: mol_type = other DNA
tactatgattaaatgaacct

SEQ ID NO: 15062 - DNA, 20 bp, synthetic construct
  misc_feature 1..20: note = Description of Artificial Sequence: Synthetic oligonucleotide
  misc_feature 1..20: note = Target: ANGPTL3; (+) strand; PAM type: YTN; PAM sequence: TTT
  source 1..20: mol_type = other DNA
actatgattaaatgaacctg

SEQ ID NO: 15063 - DNA, 20 bp, synthetic construct
  misc_feature 1..20: note = Description of Artificial Sequence: Synthetic oligonucleotide
  misc_feature 1..20: note = Target: ANGPTL3; (+) strand; PAM type: YTN; PAM sequence: TTA
  source 1..20: mol_type = other DNA
ctatgattaaatgaacctgc

SEQ ID NO: 15064 - DNA, 20 bp, synthetic construct
  misc_feature 1..20: note = Description of Artificial Sequence: Synthetic oligonucleotide
  misc_feature 1..20: note = Target: ANGPTL3; (+) strand; PAM type: YTN; PAM sequence: CTA
  source 1..20: mol_type = other DNA
tgattaaatgaacctgctcc

SEQ ID NO: 15065 - DNA, 20 bp, synthetic construct
  misc_feature 1..20: note = Description of Artificial Sequence: Synthetic oligonucleotide
  misc_feature 1..20: note = Target: ANGPTL3; (+) strand; PAM type: YTN; PAM sequence: TTA
  source 1..20: mol_type = other DNA
aatgaacctgctccccaaag

SEQ ID NO: 15066 - DNA, 20 bp, synthetic construct
  misc_feature 1..20: note = Description of Artificial Sequence: Synthetic oligonucleotide
  misc_feature 1..20: note = Target: ANGPTL3; (+) strand; PAM type: YTN; PAM sequence: CTG
  source 1..20: mol_type = other DNA
ctccccaaagcaaaatgtta

SEQ ID NO: 15067 - DNA, 20 bp, synthetic construct
  misc_feature 1..20: note = Description of Artificial Sequence: Synthetic oligonucleotide
  misc_feature 1..20: note = Target: ANGPTL3; (+) strand; PAM type: YTN; PAM sequence: CTC
  source 1..20: mol_type = other DNA
cccaaagcaaaatgttacta

SEQ ID NO: 15068 - DNA, 20 bp, synthetic construct
  misc_feature 1..20: note = Description of Artificial Sequence: Synthetic oligonucleotide
  misc_feature 1..20: note = Target: ANGPTL3; (+) strand; PAM type: YTN; PAM sequence: TTA
  source 1..20: mol_type = other DNA
ctatagtaatatacattgtg

SEQ ID NO: 15069 - DNA, 20 bp, synthetic construct
  misc_feature 1..20: note = Description of Artificial Sequence: Synthetic oligonucleotide
  misc_feature 1..20: note = Target: ANGPTL3; (+) strand; PAM type: YTN; PAM sequence: CTA
  source 1..20: mol_type = other DNA
tagtaatatacattgtgtct

SEQ ID NO: 15070 - DNA, 20 bp, synthetic construct
  misc_feature 1..20: note = Description of Artificial Sequence: Synthetic oligonucleotide
  misc_feature 1..20: note = Target: ANGPTL3; (+) strand; PAM type: YTN; PAM sequence: TTG
  source 1..20: mol_type = other DNA
tgtctaaaaataaaaatgtg

SEQ ID NO: 15071 - DNA, 20 bp, synthetic construct
  misc_feature 1..20: note = Description of Artificial Sequence: Synthetic oligonucleotide
  misc_feature 1..20: note = Target: ANGPTL3; (+) strand; PAM type: YTN; PAM sequence: CTA
  source 1..20: mol_type = other DNA
aaaataaaaatgtgtgaaga

SEQ ID NO: 15072 - DNA, 20 bp, synthetic construct
  misc_feature 1..20: note = Description of Artificial Sequence: Synthetic oligonucleotide
  misc_feature 1..20: note = Target: ANGPTL3; (+) strand; PAM type: YTN; PAM sequence: TTT
  source 1..20: mol_type = other DNA
ctgagttggaagaagagtta

SEQ ID NO: 15073 - DNA, 20 bp, synthetic construct
  misc_feature 1..20: note = Description of Artificial Sequence: Synthetic oligonucleotide
  misc_feature 1..20: note = Target: ANGPTL3; (+) strand; PAM type: YTN; PAM sequence: TTC
  source 1..20: mol_type = other DNA
tgagttggaagaagagttag

SEQ ID NO: 15074 - DNA, 20 bp, synthetic construct
  misc_feature 1..20: note = Description of Artificial Sequence: Synthetic oligonucleotide
  misc_feature 1..20: note = Target: ANGPTL3; (+) strand; PAM type: YTN; PAM sequence: CTG
  source 1..20: mol_type = other DNA
agttggaagaagagttagat

SEQ ID NO: 15075 - DNA, 20 bp, synthetic construct
  misc_feature 1..20: note = Description of Artificial Sequence: Synthetic oligonucleotide
  misc_feature 1..20: note = Target: ANGPTL3; (+) strand; PAM type: YTN; PAM sequence: TTG
  source 1..20: mol_type = other DNA
gaagaagagttagatcattt

SEQ ID NO: 15076 - DNA, 20 bp, synthetic construct
  misc_feature 1..20: note = Description of Artificial Sequence: Synthetic oligonucleotide
  misc_feature 1..20: note = Target: ANGPTL3; (+) strand; PAM type: YTN; PAM sequence: TTA
  source 1..20: mol_type = other DNA
gatcatttaactttctcata

SEQ ID NO: 15077 - DNA, 20 bp, synthetic construct
  misc_feature 1..20: note = Description of Artificial Sequence: Synthetic oligonucleotide
  misc_feature 1..20: note = Target: ANGPTL3; (+) strand; PAM type: YTN; PAM sequence: TTT
  source 1..20: mol_type = other DNA
aactttctcatatttaaatt

SEQ ID NO: 15078 - DNA, 20 bp, synthetic construct
  misc_feature 1..20: note = Description of Artificial Sequence: Synthetic oligonucleotide
  misc_feature 1..20: note = Target: ANGPTL3; (+) strand; PAM type: YTN; PAM sequence: TTA
  source 1..20: mol_type = other DNA
actttctcatatttaaatta

SEQ ID NO: 15079 - DNA, 20 bp, synthetic construct
  misc_feature 1..20: note = Description of Artificial Sequence: Synthetic oligonucleotide
  misc_feature 1..20: note = Target: ANGPTL3; (+) strand; PAM type: YTN; PAM sequence: CTT
  source 1..20: mol_type = other DNA
tctcatatttaaattaaaaa

SEQ ID NO: 15080 - DNA, 20 bp, synthetic construct
  misc_feature 1..20: note = Description of Artificial Sequence: Synthetic oligonucleotide
  misc_feature 1..20: note = Target: ANGPTL3; (+) strand; PAM type: YTN; PAM sequence: TTT
  source 1..20: mol_type = other DNA
ctcatatttaaattaaaaaa

SEQ ID NO: 15081 - DNA, 20 bp, synthetic construct
  misc_feature 1..20: note = Description of Artificial Sequence: Synthetic oligonucleotide
  misc_feature 1..20: note = Target: ANGPTL3; (+) strand; PAM type: YTN; PAM sequence: TTC
  source 1..20: mol_type = other DNA
tcatatttaaattaaaaaaa

SEQ ID NO: 15082 - DNA, 20 bp, synthetic construct
  misc_feature 1..20: note = Description of Artificial Sequence: Synthetic oligonucleotide
  misc_feature 1..20: note = Target: ANGPTL3; (+) strand; PAM type: YTN; PAM sequence: CTC
  source 1..20: mol_type = other DNA
atatttaaattaaaaaaaca

SEQ ID NO: 15083 - DNA, 20 bp, synthetic construct
  misc_feature 1..20: note = Description of Artificial Sequence: Synthetic oligonucleotide
  misc_feature 1..20: note = Target: ANGPTL3; (+) strand; PAM type: YTN; PAM sequence: TTT
  source 1..20: mol_type = other DNA
aaattaaaaaaacaaaactc

SEQ ID NO: 15084 - DNA, 20 bp, synthetic construct
  misc_feature 1..20: note = Description of Artificial Sequence: Synthetic oligonucleotide
  misc_feature 1..20: note = Target: ANGPTL3; (+) strand; PAM type: YTN; PAM sequence: TTA
  source 1..20: mol_type = other DNA
aattaaaaaaacaaaactct

SEQ ID NO: 15085 - DNA, 20 bp, synthetic construct
  misc_feature 1..20: note = Description of Artificial Sequence: Synthetic oligonucleotide
  misc_feature 1..20: note = Target: ANGPTL3; (+) strand; PAM type: YTN; PAM sequence: TTA
  source 1..20: mol_type = other DNA
aaaaaacaaaactctaaaaa

SEQ ID NO: 15086 - DNA, 20 bp, synthetic construct
  misc_feature 1..20: note = Description of Artificial Sequence: Synthetic oligonucleotide
  misc_feature 1..20: note = Target: ANGPTL3; (+) strand; PAM type: YTN; PAM sequence: CTC
  source 1..20: mol_type = other DNA
taaaaatttaagtaacttta

SEQ ID NO: 15087 - DNA, 20 bp, synthetic construct
  misc_feature 1..20: note = Description of Artificial Sequence: Synthetic oligonucleotide
  misc_feature 1..20: note = Target: ANGPTL3; (+) strand; PAM type: YTN; PAM sequence: CTA
  source 1..20: mol_type = other DNA
aaaatttaagtaactttaag

SEQ ID NO: 15088 - DNA, 20 bp, synthetic construct
  misc_feature 1..20: note = Description of Artificial Sequence: Synthetic oligonucleotide
  misc_feature 1..20: note = Target: ANGPTL3; (+) strand; PAM type: YTN; PAM sequence: TTT
  source 1..20: mol_type = other DNA
aagtaactttaagatcacat

SEQ ID NO: 15089 - DNA, 20 bp, synthetic construct
  misc_feature 1..20: note = Description of Artificial Sequence: Synthetic oligonucleotide
  misc_feature 1..20: note = Target: ANGPTL3; (+) strand; PAM type: YTN; PAM sequence: TTA
  source 1..20: mol_type = other DNA
agtaactttaagatcacata

SEQ ID NO: 15090 - DNA, 20 bp, synthetic construct
  misc_feature 1..20: note = Description of Artificial Sequence: Synthetic oligonucleotide
  misc_feature 1..20: note = Target: ANGPTL3; (+) strand; PAM type: YTN; PAM sequence: CTT
  source 1..20: mol_type = other DNA
taagatcacatagttactta

SEQ ID NO: 15091 - DNA, 20 bp, synthetic construct
  misc_feature 1..20: note = Description of Artificial Sequence: Synthetic oligonucleotide
  misc_feature 1..20: note = Target: ANGPTL3; (+) strand; PAM type: YTN; PAM sequence: TTT
  source 1..20: mol_type = other DNA
aagatcacatagttacttag

SEQ ID NO: 15092 - DNA, 20 bp, synthetic construct
  misc_feature 1..20: note = Description of Artificial Sequence: Synthetic oligonucleotide
  misc_feature 1..20: note = Target: ANGPTL3; (+) strand; PAM type: YTN; PAM sequence: TTA
  source 1..20: mol_type = other DNA
agatcacatagttacttagt

SEQ ID NO: 15093 - DNA, 20 bp, synthetic construct
  misc_feature 1..20: note = Description of Artificial Sequence: Synthetic oligonucleotide
  misc_feature 1..20: note = Target: ANGPTL3; (+) strand; PAM type: YTN; PAM sequence: TTA
  source 1..20: mol_type = other DNA
cttagtagaaaagagtaata

SEQ ID NO: 15094 - DNA, 20 bp, synthetic construct
  misc_feature 1..20: note = Description of Artificial Sequence: Synthetic oligonucleotide
  misc_feature 1..20: note = Target: ANGPTL3; (+) strand; PAM type: YTN; PAM sequence: CTT
  source 1..20: mol_type = other DNA
agtagaaaagagtaataccc

SEQ ID NO: 15095 - DNA, 20 bp, synthetic construct
  misc_feature 1..20: note = Description of Artificial Sequence: Synthetic oligonucleotide
  misc_feature 1..20: note = Target: ANGPTL3; (+) strand; PAM type: YTN; PAM sequence: TTA
  source 1..20: mol_type = other DNA
gtagaaaagagtaataccca

SEQ ID NO: 15096 - DNA, 20 bp, synthetic construct
  misc_feature 1..20: note = Description of Artificial Sequence: Synthetic oligonucleotide
  misc_feature 1..20: note = Target: ANGPTL3; (+) strand; PAM type: YTN; PAM sequence: CTT
  source 1..20: mol_type = other DNA
tacaatagatccttttaaat

SEQ ID NO: 15097 - DNA, 20 bp, synthetic construct
  misc_feature 1..20: note = Description of Artificial Sequence: Synthetic oligonucleotide
  misc_feature 1..20: note = Target: ANGPTL3; (+) strand; PAM type: YTN; PAM sequence: TTT
  source 1..20: mol_type = other DNA
acaatagatccttttaaata

SEQ ID NO: 15098 - DNA, 20 bp, synthetic construct
  misc_feature 1..20: note = Description of Artificial Sequence: Synthetic oligonucleotide
  misc_feature 1..20: note = Target: ANGPTL3; (+) strand; PAM type: YTN; PAM sequence: TTA
  source 1..20: mol_type = other DNA
caatagatccttttaaataa

SEQ ID NO: 15099 - DNA, 20 bp, synthetic construct
  misc_feature 1..20: note = Description of Artificial Sequence: Synthetic oligonucleotide
  misc_feature 1..20: note = Target: ANGPTL3; (+) strand; PAM type: YTN; PAM sequence: CTT
  source 1..20: mol_type = other DNA
ttaaataaggtcctaggaaa

SEQ ID NO: 15100 - DNA, 20 bp, synthetic construct
  misc_feature 1..20: note = Description of Artificial Sequence: Synthetic oligonucleotide
  misc_feature 1..20: note = Target: ANGPTL3; (+) strand; PAM type: YTN; PAM sequence: TTT
  source 1..20: mol_type = other DNA
taaataaggtcctaggaaat

SEQ ID NO: 15101 - DNA, 20 bp, synthetic construct
  misc_feature 1..20: note = Description of Artificial Sequence: Synthetic oligonucleotide
  misc_feature 1..20: note = Target: ANGPTL3; (+) strand; PAM type: YTN; PAM sequence: TTT
  source 1..20: mol_type = other DNA
aaataaggtcctaggaaata

SEQ ID NO: 15102 - DNA, 20 bp, synthetic construct
  misc_feature 1..20: note = Description of Artificial Sequence: Synthetic oligonucleotide
  misc_feature 1..20: note = Target: ANGPTL3; (+) strand; PAM type: YTN; PAM sequence: TTA
  source 1..20: mol_type = other DNA
aataaggtcctaggaaatat

SEQ ID NO: 15103 - DNA, 20 bp, synthetic construct
  misc_feature 1..20: note = Description of Artificial Sequence: Synthetic oligonucleotide
  misc_feature 1..20: note = Target: ANGPTL3; (+) strand; PAM type: YTN; PAM sequence: CTA
  source 1..20: mol_type = other DNA
ggaaatatcattcatgccag

SEQ ID NO: 15104 - DNA, 20 bp, synthetic construct
  misc_feature 1..20: note = Description of Artificial Sequence: Synthetic oligonucleotide
  misc_feature 1..20: note = Target: ANGPTL3; (+) strand; PAM type: YTN; PAM sequence: TTC
  source 1..20: mol_type = other DNA
atgccagcatcaaaaaacta

SEQ ID NO: 15105 - DNA, 20 bp, synthetic construct
  misc_feature 1..20: note = Description of Artificial Sequence: Synthetic oligonucleotide
  misc_feature 1..20: note = Target: ANGPTL3; (+) strand; PAM type: YTN; PAM sequence: CTA
  source 1..20: mol_type = other DNA
acactaataatgcaagatat

SEQ ID NO: 15106 - DNA, 20 bp, synthetic construct
  misc_feature 1..20: note = Description of Artificial Sequence: Synthetic oligonucleotide
  misc_feature 1..20: note = Target: ANGPTL3; (+) strand; PAM type: YTN; PAM sequence: CTA
  source 1..20: mol_type = other DNA
ataatgcaagatattatata

SEQ ID NO: 15107 - DNA, 20 bp, synthetic construct
  misc_feature 1..20: note = Description of Artificial Sequence: Synthetic oligonucleotide
  misc_feature 1..20: note = Target: ANGPTL3; (+) strand; PAM type: YTN; PAM sequence: TTA
  source 1..20: mol_type = other DNA
tatattctgcttttcttact

SEQ ID NO: 15108 - DNA, 20 bp, synthetic construct
  misc_feature 1..20: note = Description of Artificial Sequence: Synthetic oligonucleotide
  misc_feature 1..20: note = Target: ANGPTL3; (+) strand; PAM type: YTN; PAM sequence: TTC
  source 1..20: mol_type = other DNA
tgcttttcttactgtcaatg

SEQ ID NO: 15109 - DNA, 20 bp, synthetic construct
  misc_feature 1..20: note = Description of Artificial Sequence: Synthetic oligonucleotide
  misc_feature 1..20: note = Target: ANGPTL3; (+) strand; PAM type: YTN; PAM sequence: CTG
  source 1..20: mol_type = other DNA
cttttcttactgtcaatgag

SEQ ID NO: 15110 - DNA, 20 bp, synthetic construct
  misc_feature 1..20: note = Description of Artificial Sequence: Synthetic oligonucleotide
  misc_feature 1..20: note = Target: ANGPTL3; (+) strand; PAM type: YTN; PAM sequence: CTT
  source 1..20: mol_type = other DNA
ttcttactgtcaatgagaaa

SEQ ID NO: 15111 - DNA, 20 bp, synthetic construct
  misc_feature 1..20: note = Description of Artificial Sequence: Synthetic oligonucleotide
  misc_feature 1..20: note = Target: ANGPTL3; (+) strand; PAM type: YTN; PAM sequence: TTT
  source 1..20: mol_type = other DNA
tcttactgtcaatgagaaaa

SEQ ID NO: 15112 - DNA, 20 bp, synthetic construct
  misc_feature 1..20: note = Description of Artificial Sequence: Synthetic oligonucleotide
  misc_feature 1..20: note = Target: ANGPTL3; (+) strand; PAM type: YTN; PAM sequence: TTT
  source 1..20: mol_type = other DNA
cttactgtcaatgagaaaaa

SEQ ID NO: 15113 - DNA, 20 bp, synthetic construct
  misc_feature 1..20: note = Description of Artificial Sequence: Synthetic oligonucleotide
  misc_feature 1..20: note = Target: ANGPTL3; (+) strand; PAM type: YTN; PAM sequence: TTC
  source 1..20: mol_type = other DNA
ttactgtcaatgagaaaaac

SEQ ID NO: 15114 - DNA, 20 bp, synthetic construct
  misc_feature 1..20: note = Description of Artificial Sequence: Synthetic oligonucleotide
  misc_feature 1..20: note = Target: ANGPTL3; (+) strand; PAM type: YTN; PAM sequence: CTT
  source 1..20: mol_type = other DNA
actgtcaatgagaaaaacta

SEQ ID NO: 15115 - DNA, 20 bp, synthetic construct
  misc_feature 1..20: note = Description of Artificial Sequence: Synthetic oligonucleotide
  misc_feature 1..20: note = Target: ANGPTL3; (+) strand; PAM type: YTN; PAM sequence: TTA
  source 1..20: mol_type = other DNA
ctgtcaatgagaaaaactat

SEQ ID NO: 15116 - DNA, 20 bp, synthetic construct
  misc_feature 1..20: note = Description of Artificial Sequence: Synthetic oligonucleotide
  misc_feature 1..20: note = Target: ANGPTL3; (+) strand; PAM type: YTN; PAM sequence: CTG
  source 1..20: mol_type = other DNA
tcaatgagaaaaactatcat

SEQ ID NO: 15117 - DNA, 20 bp, synthetic construct
  misc_feature 1..20: note = Description of Artificial Sequence: Synthetic oligonucleotide
  misc_feature 1..20: note = Target: ANGPTL3; (+) strand; PAM type: YTN; PAM sequence: CTA
  source 1..20: mol_type = other DNA
tcattcaataaattgcaaac

SEQ ID NO: 15118 - DNA, 20 bp, synthetic construct
  misc_feature 1..20: note = Description of Artificial Sequence: Synthetic oligonucleotide
  misc_feature 1..20: note = Target: ANGPTL3; (+) strand; PAM type: YTN; PAM sequence: TTC
  source 1..20: mol_type = other DNA
aataaattgcaaacccaaca

SEQ ID NO: 15119 - DNA, 20 bp, synthetic construct
  misc_feature 1..20: note = Description of Artificial Sequence: Synthetic oligonucleotide
  misc_feature 1..20: note = Target: ANGPTL3; (+) strand; PAM type: YTN; PAM sequence: TTG
  source 1..20: mol_type = other DNA
caaacccaacacacttaaat

SEQ ID NO: 15120 - DNA, 20 bp, synthetic construct
  misc_feature 1..20: note = Description of Artificial Sequence: Synthetic oligonucleotide
  misc_feature 1..20: note = Target: ANGPTL3; (+) strand; PAM type: YTN; PAM sequence: CTT
  source 1..20: mol_type = other DNA
aaataaaaataaaatgttac

SEQ ID NO: 15121 - DNA, 20 bp, synthetic construct
  misc_feature 1..20: note = Description of Artificial Sequence: Synthetic oligonucleotide
  misc_feature 1..20: note = Target: ANGPTL3; (+) strand; PAM type: YTN; PAM sequence: TTA
  source 1..20: mol_type = other DNA
aataaaaataaaatgttact

SEQ ID NO: 15122 - DNA, 20 bp, synthetic construct
  misc_feature 1..20: note = Description of Artificial Sequence: Synthetic oligonucleotide
  misc_feature 1..20: note = Target: ANGPTL3; (+) strand; PAM type: YTN; PAM sequence: TTA
  source 1..20: mol_type = other DNA
ctgctaaactaacgataaac

SEQ ID NO: 15123 - DNA, 20 bp, synthetic construct
  misc_feature 1..20: note = Description of Artificial Sequence: Synthetic oligonucleotide
  misc_feature 1..20: note = Target: ANGPTL3; (+) strand; PAM type: YTN; PAM sequence: CTG
  source 1..20: mol_type = other DNA
ctaaactaacgataaactac

SEQ ID NO: 15124 - DNA, 20 bp, synthetic construct
  misc_feature 1..20: note = Description of Artificial Sequence: Synthetic oligonucleotide
  misc_feature 1..20: note = Target: ANGPTL3; (+) strand; PAM type: YTN; PAM sequence: CTA
  source 1..20: mol_type = other DNA
aactaacgataaactactga

SEQ ID NO: 15125 - DNA, 20 bp, synthetic construct
  misc_feature 1..20: note = Description of Artificial Sequence: Synthetic oligonucleotide
  misc_feature 1..20: note = Target: ANGPTL3; (+) strand; PAM type: YTN; PAM sequence: CTA
  source 1..20: mol_type = other DNA
acgataaactactgaatata

SEQ ID NO: 15126 - DNA, 20 bp, synthetic construct
  misc_feature 1..20: note = Description of Artificial Sequence: Synthetic oligonucleotide
  misc_feature 1..20: note = Target: ANGPTL3; (+) strand; PAM type: YTN; PAM sequence: CTA
  source 1..20: mol_type = other DNA
ctgaatatatagaaagtaag

SEQ ID NO: 15127 - DNA, 20 bp, synthetic construct
  misc_feature 1..20: note = Description of Artificial Sequence: Synthetic oligonucleotide
  misc_feature 1..20: note = Target: ANGPTL3; (+) strand; PAM type: YTN; PAM sequence: CTG
  source 1..20: mol_type = other DNA
aatatatagaaagtaagcaa

SEQ ID NO: 15128 - DNA, 20 bp, synthetic construct
  misc_feature 1..20: note = Description of Artificial Sequence: Synthetic oligonucleotide
  misc_feature 1..20: note = Target: ANGPTL3; (+) strand; PAM type: YTN; PAM sequence: CTT
  source 1..20: mol_type = other DNA
gccaacctgccaacatctac

SEQ ID NO: 15129 - DNA, 20 bp, synthetic construct
  misc_feature 1..20: note = Description of Artificial Sequence: Synthetic oligonucleotide
  misc_feature 1..20: note = Target: ANGPTL3; (+) strand; PAM type: YTN; PAM sequence: TTG
  source 1..20: mol_type = other DNA
ccaacctgccaacatctaca

SEQ ID NO: 15130 - DNA, 20 bp, synthetic construct
  misc_feature 1..20: note = Description of Artificial Sequence: Synthetic oligonucleotide
  misc_feature 1..20: note = Target: ANGPTL3; (+) strand; PAM type: YTN; PAM sequence: CTG
  source 1..20: mol_type = other DNA
ccaacatctacagatatgtt

SEQ ID NO: 15131 - DNA, 20 bp, synthetic construct
  misc_feature 1..20: note = Description of Artificial Sequence: Synthetic oligonucleotide
  misc_feature 1..20: note = Target: ANGPTL3; (+) strand; PAM type: YTN; PAM sequence: CTA
  source 1..20: mol_type = other DNA
cagatatgtttacaggtcaa

SEQ ID NO: 15132 - DNA, 20 bp, synthetic construct
  misc_feature 1..20: note = Description of Artificial Sequence: Synthetic oligonucleotide
  misc_feature 1..20: note = Target: ANGPTL3; (+) strand; PAM type: YTN; PAM sequence: TTT
  source 1..20: mol_type = other DNA
acaggtcaaaaattatcaaa

SEQ ID NO: 15133 - DNA, 20 bp, synthetic construct
  misc_feature 1..20: note = Description of Artificial Sequence: Synthetic oligonucleotide
  misc_feature 1..20: note = Target: ANGPTL3; (+) strand; PAM type: YTN; PAM sequence: TTA
  source 1..20: mol_type = other DNA
caggtcaaaaattatcaaat

SEQ ID NO: 15134 - DNA, 20 bp, synthetic construct
  misc_feature 1..20: note = Description of Artificial Sequence: Synthetic oligonucleotide
  misc_feature 1..20: note = Target: ANGPTL3; (+) strand; PAM type: YTN; PAM sequence: TTA
  source 1..20: mol_type = other DNA
tcaaattatcaagaaagcct

SEQ ID NO: 15135 - DNA, 20 bp, synthetic construct
  misc_feature 1..20: note = Description of Artificial Sequence: Synthetic oligonucleotide
  misc_feature 1..20: note = Target: ANGPTL3; (+) strand; PAM type: YTN; PAM sequence: TTA
  source 1..20: mol_type = other DNA
tcaagaaagcctggttcaaa

SEQ ID NO: 15136 - DNA, 20 bp, synthetic construct
  misc_feature 1..20: note = Description of Artificial Sequence: Synthetic oligonucleotide
  misc_feature 1..20: note = Target: ANGPTL3; (+) strand; PAM type: YTN; PAM sequence: CTG
  source 1..20: mol_type = other DNA
gttcaaattatgtattatgt

SEQ ID NO: 15137 - DNA, 20 bp, synthetic construct
  misc_feature 1..20: note = Description of Artificial Sequence: Synthetic oligonucleotide
  misc_feature 1..20: note = Target: ANGPTL3; (+) strand; PAM type: YTN; PAM sequence: TTC
  source 1..20: mol_type = other DNA
aaattatgtattatgtcttt

SEQ ID NO: 15138 - DNA, 20 bp, synthetic construct
  misc_feature 1..20: note = Description of Artificial Sequence: Synthetic oligonucleotide
  misc_feature 1..20: note = Target: ANGPTL3; (+) strand; PAM type: YTN; PAM sequence: TTA
  source 1..20: mol_type = other DNA
tgtattatgtctttatcaca

SEQ ID NO: 15139 - DNA, 20 bp, synthetic construct
  misc_feature 1..20: note = Description of Artificial Sequence: Synthetic oligonucleotide
  misc_feature 1..20: note = Target: ANGPTL3; (+) strand; PAM type: YTN; PAM sequence: TTA
  source 1..20: mol_type = other DNA
tgtctttatcacaggtctga

SEQ ID NO: 15140 - DNA, 20 bp, synthetic construct
  misc_feature 1..20: note = Description of Artificial Sequence: Synthetic oligonucleotide
  misc_feature 1..20: note = Target: ANGPTL3; (+) strand; PAM type: YTN; PAM sequence: CTT
  source 1..20: mol_type = other DNA
tatcacaggtctgaagatca

SEQ ID NO: 15141 - DNA, 20 bp, synthetic construct
  misc_feature 1..20: note = Description of Artificial Sequence: Synthetic oligonucleotide
  misc_feature 1..20: note = Target: ANGPTL3; (+) strand; PAM type: YTN; PAM sequence: TTT
  source 1..20: mol_type = other DNA
atcacaggtctgaagatcag

SEQ ID NO: 15142 - DNA, 20 bp, synthetic construct
  misc_feature 1..20: note = Description of Artificial Sequence: Synthetic oligonucleotide
  misc_feature 1..20: note = Target: ANGPTL3; (+) strand; PAM type: YTN; PAM sequence: TTA
  source 1..20: mol_type = other DNA
tcacaggtctgaagatcagt

SEQ ID NO: 15143 - DNA, 20 bp, synthetic construct
  misc_feature 1..20: note = Description of Artificial Sequence: Synthetic oligonucleotide
  misc_feature 1..20: note = Target: ANGPTL3; (+) strand; PAM type: YTN; PAM sequence: CTG
  source 1..20: mol_type = other DNA
aagatcagtaagacctaaaa

SEQ ID NO: 15144 - DNA, 20 bp, synthetic construct
  misc_feature 1..20: note = Description of Artificial Sequence: Synthetic oligonucleotide
  misc_feature 1..20: note = Target: ANGPTL3; (+) strand; PAM type: YTN; PAM sequence: CTA
  source 1..20: mol_type = other DNA
aaactgaaaattattaaact

SEQ ID NO: 15145 - DNA, 20 bp, synthetic construct
  misc_feature 1..20: note = Description of Artificial Sequence: Synthetic oligonucleotide
  misc_feature 1..20: note = Target: ANGPTL3; (+) strand; PAM type: YTN; PAM sequence: CTG
  source 1..20: mol_type = other DNA
aaaattattaaacttaaaat

SEQ ID NO: 15146 - DNA, 20 bp, synthetic construct
  misc_feature 1..20: note = Description of Artificial Sequence: Synthetic oligonucleotide
  misc_feature 1..20: note = Target: ANGPTL3; (+) strand; PAM type: YTN; PAM sequence: TTA
  source 1..20: mol_type = other DNA
ttaaacttaaaatctgaaca

SEQ ID NO: 15147 - DNA, 20 bp, synthetic construct
  misc_feature 1..20: note = Description of Artificial Sequence: Synthetic oligonucleotide
  misc_feature 1..20: note = Target: ANGPTL3; (+) strand; PAM type: YTN; PAM sequence: TTA
  source 1..20: mol_type = other DNA
aacttaaaatctgaacagaa

SEQ ID NO: 15148 - DNA, 20 bp, synthetic construct
  misc_feature 1..20: note = Description of Artificial Sequence: Synthetic oligonucleotide
  misc_feature 1..20: note = Target: ANGPTL3; (+) strand; PAM type: YTN; PAM sequence: CTT
  source 1..20: mol_type = other DNA
aaaatctgaacagaatatca

SEQ ID NO: 15149 - DNA, 20 bp, synthetic construct
  misc_feature 1..20: note = Description of Artificial Sequence: Synthetic oligonucleotide
  misc_feature 1..20: note = Target: ANGPTL3; (+) strand; PAM type: YTN; PAM sequence: TTA
  source 1..20: mol_type = other DNA
aaatctgaacagaatatcaa

SEQ ID NO: 15150 - DNA, 20 bp, synthetic construct
  misc_feature 1..20: note = Description of Artificial Sequence: Synthetic oligonucleotide
  misc_feature 1..20: note = Target: ANGPTL3; (+) strand; PAM type: YTN; PAM sequence: CTG
  source 1..20: mol_type = other DNA
aacagaatatcaaatatatt

SEQ ID NO: 15151 - DNA, 20 bp, synthetic construct
  misc_feature 1..20: note = Description of Artificial Sequence: Synthetic oligonucleotide
  misc_feature 1..20: note = Target: ANGPTL3; (+) strand; PAM type: YTN; PAM sequence: TTT
  source 1..20: mol_type = other DNA
tattcatataaataaaagaa

SEQ ID NO: 15152 - DNA, 20 bp, synthetic construct
  misc_feature 1..20: note = Description of Artificial Sequence: Synthetic oligonucleotide
  misc_feature 1..20: note = Target: ANGPTL3; (+) strand; PAM type: YTN; PAM sequence: TTT
  source 1..20: mol_type = other DNA
attcatataaataaaagaat

SEQ ID NO: 15153 - DNA, 20 bp, synthetic construct
  misc_feature 1..20: note = Description of Artificial Sequence: Synthetic oligonucleotide
  misc_feature 1..20: note = Target: ANGPTL3; (+) strand; PAM type: YTN; PAM sequence: TTA
  source 1..20: mol_type = other DNA
ttcatataaataaaagaata

SEQ ID NO: 15154 - DNA, 20 bp, synthetic construct
  misc_feature 1..20: note = Description of Artificial Sequence: Synthetic oligonucleotide
  misc_feature 1..20: note = Target: ANGPTL3; (+) strand; PAM type: YTN; PAM sequence: TTC
  source 1..20: mol_type = other DNA
atataaataaaagaatacat

SEQ ID NO: 15155 - DNA, 20 bp, synthetic construct
  misc_feature 1..20: note = Description of Artificial Sequence: Synthetic oligonucleotide
  misc_feature 1..20: note = Target: ANGPTL3; (+) strand; PAM type: YTN; PAM sequence: TTA
  source 1..20: mol_type = other DNA
caatattctaagcaaagcag

SEQ ID NO: 15156 - DNA, 20 bp, synthetic construct
  misc_feature 1..20: note = Description of Artificial Sequence: Synthetic oligonucleotide
  misc_feature 1..20: note = Target: ANGPTL3; (+) strand; PAM type: YTN; PAM sequence: TTC
  source 1..20: mol_type = other DNA
taagcaaagcagtctctact

SEQ ID NO: 15157 - DNA, 20 bp, synthetic construct
  misc_feature 1..20: note = Description of Artificial Sequence: Synthetic oligonucleotide
  misc_feature 1..20: note = Target: ANGPTL3; (+) strand; PAM type: YTN; PAM sequence: CTA
  source 1..20: mol_type = other DNA
agcaaagcagtctctacttt

SEQ ID NO: 15158 - DNA, 20 bp, synthetic construct
  misc_feature 1..20: note = Description of Artificial Sequence: Synthetic oligonucleotide
  misc_feature 1..20: note = Target: ANGPTL3; (+) strand; PAM type: YTN; PAM sequence: CTC
  source 1..20: mol_type = other DNA
tacttttggccttgctctgt

SEQ ID NO: 15159 - DNA, 20 bp, synthetic construct
  misc_feature 1..20: note = Description of Artificial Sequence: Synthetic oligonucleotide
  misc_feature 1..20: note = Target: ANGPTL3; (+) strand; PAM type: YTN; PAM sequence: CTA
  source 1..20: mol_type = other DNA
cttttggccttgctctgttt

SEQ ID NO: 15160 - DNA, 20 bp, synthetic construct
  misc_feature 1..20: note = Description of Artificial Sequence: Synthetic oligonucleotide
  misc_feature 1..20: note = Target: ANGPTL3; (+) strand; PAM type: YTN; PAM sequence: CTT
  source 1..20: mol_type = other DNA
ttggccttgctctgttttcc

SEQ ID NO: 15161 - DNA, 20 bp, synthetic construct
  misc_feature 1..20: note = Description of Artificial Sequence: Synthetic oligonucleotide
  misc_feature 1..20: note = Target: ANGPTL3; (+) strand; PAM type: YTN; PAM sequence: TTT
  source 1..20: mol_type = other DNA
tggccttgctctgttttccg

SEQ ID NO: 15162 - DNA, 20 bp, synthetic construct
  misc_feature 1..20: note = Description of Artificial Sequence: Synthetic oligonucleotide
  misc_feature 1..20: note = Target: ANGPTL3; (+) strand; PAM type: YTN; PAM sequence: TTT
  source 1..20: mol_type = other DNA
ggccttgctctgttttccga

SEQ ID NO: 15163 - DNA, 20 bp, synthetic construct
  misc_feature 1..20: note = Description of Artificial Sequence: Synthetic oligonucleotide
  misc_feature 1..20: note = Target: ANGPTL3; (+) strand; PAM type: YTN; PAM sequence: TTG
  source 1..20: mol_type = other DNA
gccttgctctgttttccgac

SEQ ID NO: 15164 - DNA, 20 bp, synthetic construct
  misc_feature 1..20: note = Description of Artificial Sequence: Synthetic oligonucleotide
  misc_feature 1..20: note = Target: ANGPTL3; (+) strand; PAM type: YTN; PAM sequence: CTT
  source 1..20: mol_type = other DNA
gctctgttttccgaccaatg

SEQ ID NO: 15165 - DNA, 20 bp, synthetic construct
  misc_feature 1..20: note = Description of Artificial Sequence: Synthetic oligonucleotide
  misc_feature 1..20: note = Target: ANGPTL3; (+) strand; PAM type: YTN; PAM sequence: TTG
  source 1..20: mol_type = other DNA
ctctgttttccgaccaatgt

SEQ ID NO: 15166 - DNA, 20 bp, synthetic construct
  misc_feature 1..20: note = Description of Artificial Sequence: Synthetic oligonucleotide
  misc_feature 1..20: note = Target: ANGPTL3; (+) strand; PAM type: YTN; PAM sequence: CTC
  source 1..20: mol_type = other DNA
tgttttccgaccaatgtctg

SEQ ID NO: 15167 - DNA, 20 bp, synthetic construct
  misc_feature 1..20: note = Description of Artificial Sequence: Synthetic oligonucleotide
  misc_feature 1..20: note = Target: ANGPTL3; (+) strand; PAM type: YTN; PAM sequence: CTG
  source 1..20: mol_type = other DNA
ttttccgaccaatgtctgct

SEQ ID NO: 15168 - DNA, 20 bp, synthetic construct
  misc_feature 1..20: note = Description of Artificial Sequence: Synthetic oligonucleotide
  misc_feature 1..20: note = Target: ANGPTL3; (+) strand; PAM type: YTN; PAM sequence: TTT
  source 1..20: mol_type = other DNA
tccgaccaatgtctgctttt

SEQ ID NO: 15169 - DNA, 20 bp, synthetic construct
  misc_feature 1..20: note = Description of Artificial Sequence: Synthetic oligonucleotide
  misc_feature 1..20: note = Target: ANGPTL3; (+) strand; PAM type: YTN; PAM sequence: TTT
  source 1..20: mol_type = other DNA
ccgaccaatgtctgcttttt

SEQ ID NO: 15170 - DNA, 20 bp, synthetic construct
  misc_feature 1..20: note = Description of Artificial Sequence: Synthetic oligonucleotide
  misc_feature 1..20: note = Target: ANGPTL3; (+) strand; PAM type: YTN; PAM sequence: TTC
  source 1..20: mol_type = other DNA
cgaccaatgtctgctttttt

SEQ ID NO: 15171 - DNA, 20 bp, synthetic construct
  misc_feature 1..20: note = Description of Artificial Sequence: Synthetic oligonucleotide
  misc_feature 1..20: note = Target: ANGPTL3; (+) strand; PAM type: YTN; PAM sequence: CTG
  source 1..20: mol_type = other DNA
cttttttgccttgctttatt

SEQ ID NO: 15172 - DNA, 20 bp, synthetic construct
  misc_feature 1..20: note = Description of Artificial Sequence: Synthetic oligonucleotide
  misc_feature 1..20: note = Target: ANGPTL3; (+) strand; PAM type: YTN; PAM sequence: CTT
  source 1..20: mol_type = other DNA
ttttgccttgctttattttt

SEQ ID NO: 15173 - DNA, 20 bp, synthetic construct
  misc_feature 1..20: note = Description of Artificial Sequence: Synthetic oligonucleotide
  misc_feature 1..20: note = Target: ANGPTL3; (+) strand; PAM type: YTN; PAM sequence: TTT
  source 1..20: mol_type = other DNA
tttgccttgctttatttttt

SEQ ID NO: 15174 - DNA, 20 bp, synthetic construct
  misc_feature 1..20: note = Description of Artificial Sequence: Synthetic oligonucleotide
  misc_feature 1..20: note = Target: ANGPTL3; (+) strand; PAM type: YTN; PAM sequence: TTT
  source 1..20: mol_type = other DNA
ttgccttgctttattttttt

SEQ ID NO: 15175 - DNA, 20 bp, synthetic construct
  misc_feature 1..20: note = Description of Artificial Sequence: Synthetic oligonucleotide
  misc_feature 1..20: note = Target: ANGPTL3; (+) strand; PAM type: YTN; PAM sequence: TTT
  source 1..20: mol_type = other DNA
tgccttgctttattttttta

SEQ ID NO: 15176 - DNA, 20 bp, synthetic construct
  misc_feature 1..20: note = Description of Artificial Sequence: Synthetic oligonucleotide
  misc_feature 1..20: note = Target: ANGPTL3; (+) strand; PAM type: YTN; PAM sequence: TTT
  source 1..20: mol_type = other DNA
gccttgctttatttttttat

SEQ ID NO: 15177 - DNA, 20 bp, synthetic construct
  misc_feature 1..20: note = Description of Artificial Sequence: Synthetic oligonucleotide
  misc_feature 1..20: note = Target: ANGPTL3; (+) strand; PAM type: YTN; PAM sequence: TTG
  source 1..20: mol_type = other DNA
ccttgctttatttttttatc

SEQ ID NO: 15178 - DNA, 20 bp, synthetic construct
  misc_feature 1..20: note = Description of Artificial Sequence: Synthetic oligonucleotide
  misc_feature 1..20: note = Target: ANGPTL3; (+) strand; PAM type: YTN; PAM sequence: CTT
  source 1..20: mol_type = other DNA
gctttatttttttatcttat

SEQ ID NO: 15179 - DNA, 20 bp, synthetic construct
  misc_feature 1..20: note = Description of Artificial Sequence: Synthetic oligonucleotide
  misc_feature 1..20: note = Target: ANGPTL3; (+) strand; PAM type: YTN; PAM sequence: TTG
  source 1..20: mol_type = other DNA
ctttatttttttatcttatt

SEQ ID NO: 15180 - DNA, 20 bp, synthetic construct
  misc_feature 1..20: note = Description of Artificial Sequence: Synthetic oligonucleotide
  misc_feature 1..20: note = Target: ANGPTL3; (+) strand; PAM type: YTN; PAM sequence: CTT
  source 1..20: mol_type = other DNA
tatttttttatcttattaaa

SEQ ID NO: 15181 - DNA, 20 bp, synthetic construct
  misc_feature 1..20: note = Description of Artificial Sequence: Synthetic oligonucleotide
  misc_feature 1..20: note = Target: ANGPTL3; (+) strand; PAM type: YTN; PAM sequence: TTT
  source 1..20: mol_type = other DNA
atttttttatcttattaaat

SEQ ID NO: 15182 - DNA, 20 bp, synthetic construct
  misc_feature 1..20: note = Description of Artificial Sequence: Synthetic oligonucleotide
  misc_feature 1..20: note = Target: ANGPTL3; (+) strand; PAM type: YTN; PAM sequence: TTA
  source 1..20: mol_type = other DNA
tttttttatcttattaaata

SEQ ID NO: 15183 - DNA, 20 bp, synthetic construct
  misc_feature 1..20: note = Description of Artificial Sequence: Synthetic oligonucleotide
  misc_feature 1..20: note = Target: ANGPTL3; (+) strand; PAM type: YTN; PAM sequence: TTT
  source 1..20: mol_type = other DNA
ttttatcttattaaataatg

SEQ ID NO: 15184 - DNA, 20 bp, synthetic construct
  misc_feature 1..20: note = Description of Artificial Sequence: Synthetic oligonucleotide
  misc_feature 1..20: note = Target: ANGPTL3; (+) strand; PAM type: YTN; PAM sequence: TTT
  source 1..20: mol_type = other DNA
tttatcttattaaataatgt

SEQ ID NO: 15185 - DNA, 20 bp, synthetic construct
  misc_feature 1..20: note = Description of Artificial Sequence: Synthetic oligonucleotide
  misc_feature 1..20: note = Target: ANGPTL3; (+) strand; PAM type: YTN; PAM sequence: TTT
  source 1..20: mol_type = other DNA
ttatcttattaaataatgtc

SEQ ID NO: 15186 - DNA, 20 bp, synthetic construct
  misc_feature 1..20: note = Description of Artificial Sequence: Synthetic oligonucleotide
  misc_feature 1..20: note = Target: ANGPTL3; (+) strand; PAM type: YTN; PAM sequence: TTT
  source 1..20: mol_type = other DNA
tatcttattaaataatgtcc

SEQ ID NO: 15187 - DNA, 20 bp, synthetic construct
  misc_feature 1..20: note = Description of Artificial Sequence: Synthetic oligonucleotide
  misc_feature 1..20: note = Target: ANGPTL3; (+) strand; PAM type: YTN; PAM sequence: TTT
  source 1..20: mol_type = other DNA
atcttattaaataatgtccc

SEQ ID NO: 15188 - DNA, 20 bp, synthetic construct
  misc_feature 1..20: note = Description of Artificial Sequence: Synthetic oligonucleotide
  misc_feature 1..20: note = Target: ANGPTL3; (+) strand; PAM type: YTN; PAM sequence: TTA
  source 1..20: mol_type = other DNA
tcttattaaataatgtccct

SEQ ID NO: 15189 - DNA, 20 bp, synthetic construct
  misc_feature 1..20: note = Description of Artificial Sequence: Synthetic oligonucleotide
  misc_feature 1..20: note = Target: ANGPTL3; (+) strand; PAM type: YTN; PAM sequence: CTT
  source 1..20: mol_type = other DNA
attaaataatgtccctgatt

SEQ ID NO: 15190 - DNA, 20 bp, synthetic construct
  misc_feature 1..20: note = Description of Artificial Sequence: Synthetic oligonucleotide
  misc_feature 1..20: note = Target: ANGPTL3; (+) strand; PAM type: YTN; PAM sequence: TTA
  source 1..20: mol_type = other DNA
ttaaataatgtccctgatta

SEQ ID NO: 15191 - DNA, 20 bp, synthetic construct
  misc_feature 1..20: note = Description of Artificial Sequence: Synthetic oligonucleotide
  misc_feature 1..20: note = Target: ANGPTL3; (+) strand; PAM type: YTN; PAM sequence: TTA
  source 1..20: mol_type = other DNA
aataatgtccctgattaaat

SEQ ID NO: 15192 - DNA, 20 bp, synthetic construct
  misc_feature 1..20: note = Description of Artificial Sequence: Synthetic oligonucleotide
  misc_feature 1..20: note = Target: ANGPTL3; (+) strand; PAM type: YTN; PAM sequence: CTG
  source 1..20: mol_type = other DNA
attaaatattttgagaacag

SEQ ID NO: 15193 - DNA, 20 bp, synthetic construct
  misc_feature 1..20: note = Description of Artificial Sequence: Synthetic oligonucleotide
  misc_feature 1..20: note = Target: ANGPTL3; (+) strand; PAM type: YTN; PAM sequence: TTA
  source 1..20: mol_type = other DNA
aatattttgagaacaggtaa

SEQ ID NO: 15194 - DNA, 20 bp, synthetic construct
  misc_feature 1..20: note = Description of Artificial Sequence: Synthetic oligonucleotide
  misc_feature 1..20: note = Target: ANGPTL3; (+) strand; PAM type: YTN; PAM sequence: TTT
  source 1..20: mol_type = other DNA
tgagaacaggtaatctgtac

SEQ ID NO: 15195 - DNA, 20 bp, synthetic construct
  misc_feature 1..20: note = Description of Artificial Sequence: Synthetic oligonucleotide
  misc_feature 1..20: note = Target: ANGPTL3; (+) strand; PAM type: YTN; PAM sequence: TTT
  source 1..20: mol_type = other DNA
gagaacaggtaatctgtaca

SEQ ID NO: 15196 - DNA, 20 bp, synthetic construct
  misc_feature 1..20: note = Description of Artificial Sequence: Synthetic oligonucleotide
  misc_feature 1..20: note = Target: ANGPTL3; (+) strand; PAM type: YTN; PAM sequence: TTG
  source 1..20: mol_type = other DNA
agaacaggtaatctgtacaa

SEQ ID NO: 15197 - DNA, 20 bp, synthetic construct
  misc_feature 1..20: note = Description of Artificial Sequence: Synthetic oligonucleotide
  misc_feature 1..20: note = Target: ANGPTL3; (+) strand; PAM type: YTN; PAM sequence: CTG
  source 1..20: mol_type = other DNA
tacaatctgaataacactgt

SEQ ID NO: 15198 - DNA, 20 bp, synthetic construct
  misc_feature 1..20: note = Description of Artificial Sequence: Synthetic oligonucleotide
  misc_feature 1..20: note = Target: ANGPTL3; (+) strand; PAM type: YTN; PAM sequence: CTG
  source 1..20: mol_type = other DNA
aataacactgtttatctaaa

SEQ ID NO: 15199 - DNA, 20 bp, synthetic construct
  misc_feature 1..20: note = Description of Artificial Sequence: Synthetic oligonucleotide
  misc_feature 1..20: note = Target: ANGPTL3; (+) strand; PAM type: YTN; PAM sequence: CTG
  source 1..20: mol_type = other DNA
tttatctaaatatcaaacac

SEQ ID NO: 15200 - DNA, 20 bp, synthetic construct
  misc_feature 1..20: note = Description of Artificial Sequence: Synthetic oligonucleotide
  misc_feature 1..20: note = Target: ANGPTL3; (+) strand; PAM type: YTN; PAM sequence: TTT
  source 1..20: mol_type = other DNA
atctaaatatcaaacaccgt

SEQ ID NO: 15201 - DNA, 20 bp, synthetic construct
  misc_feature 1..20: note = Description of Artificial Sequence: Synthetic oligonucleotide
  misc_feature 1..20: note = Target: ANGPTL3; (+) strand; PAM type: YTN; PAM sequence: TTA
  source 1..20: mol_type = other DNA
tctaaatatcaaacaccgtt

SEQ ID NO: 15202 - DNA, 20 bp, synthetic construct
  misc_feature 1..20: note = Description of Artificial Sequence: Synthetic oligonucleotide
  misc_feature 1..20: note = Target: ANGPTL3; (+) strand; PAM type: YTN; PAM sequence: CTA
  source 1..20: mol_type = other DNA
aatatcaaacaccgttataa

SEQ ID NO: 15203 - DNA, 20 bp, synthetic construct
  misc_feature 1..20: note = Description of Artificial Sequence: Synthetic oligonucleotide
  misc_feature 1..20: note = Target: ANGPTL3; (+) strand; PAM type: YTN; PAM sequence: TTA
  source 1..20: mol_type = other DNA
taacattatgaactgaaaga

SEQ ID NO: 15204 - DNA, 20 bp, synthetic construct
  misc_feature 1..20: note = Description of Artificial Sequence: Synthetic oligonucleotide
  misc_feature 1..20: note = Target: ANGPTL3; (+) strand; PAM type: YTN; PAM sequence: TTA
  source 1..20: mol_type = other DNA
tgaactgaaagacaaactgt

SEQ ID NO: 15205 - DNA, 20 bp, synthetic construct
  misc_feature 1..20: note = Description of Artificial Sequence: Synthetic oligonucleotide
  misc_feature 1..20: note = Target: ANGPTL3; (+) strand; PAM type: YTN; PAM sequence: CTG
  source 1..20: mol_type = other DNA
aaagacaaactgtacttctg

SEQ ID NO: 15206 - DNA, 20 bp, synthetic construct
  misc_feature 1..20: note = Description of Artificial Sequence: Synthetic oligonucleotide
  misc_feature 1..20: note = Target: ANGPTL3; (+) strand; PAM type: YTN; PAM sequence: CTG
  source 1..20: mol_type = other DNA
tacttctgacatccttactc

SEQ ID NO: 15207 - DNA, 20 bp, synthetic construct
  misc_feature 1..20: note = Description of Artificial Sequence: Synthetic oligonucleotide
  misc_feature 1..20: note = Target: ANGPTL3; (+) strand; PAM type: YTN; PAM sequence: CTT
  source 1..20: mol_type = other DNA
ctgacatccttactcagatt

SEQ ID NO: 15208 - DNA, 20 bp, synthetic construct
  misc_feature 1..20: note = Description of Artificial Sequence: Synthetic oligonucleotide
  misc_feature 1..20: note = Target: ANGPTL3; (+) strand; PAM type: YTN; PAM sequence: TTC
  source 1..20: mol_type = other DNA
tgacatccttactcagattt

SEQ ID NO: 15209 - DNA, 20 bp, synthetic construct
  misc_feature 1..20: note = Description of Artificial Sequence: Synthetic oligonucleotide
  misc_feature 1..20: note = Target: ANGPTL3; (+) strand; PAM type: YTN; PAM sequence: CTG
  source 1..20: mol_type = other DNA
acatccttactcagatttcc

SEQ ID NO: 15210 - DNA, 20 bp, synthetic construct
  misc_feature 1..20: note = Description of Artificial Sequence: Synthetic oligonucleotide
  misc_feature 1..20: note = Target: ANGPTL3; (+) strand; PAM type: YTN; PAM sequence: CTT
  source 1..20: mol_type = other DNA
actcagatttcccctaattg

SEQ ID NO: 15211 - DNA, 20 bp, synthetic construct
  misc_feature 1..20: note = Description of Artificial Sequence: Synthetic oligonucleotide
  misc_feature 1..20: note = Target: ANGPTL3; (+) strand; PAM type: YTN; PAM sequence: TTA
  source 1..20: mol_type = other DNA
ctcagatttcccctaattgt

SEQ ID NO: 15212 - DNA, 20 bp, synthetic construct
  misc_feature 1..20: note = Description of Artificial Sequence: Synthetic oligonucleotide
  misc_feature 1..20: note = Target: ANGPTL3; (+) strand; PAM type: YTN; PAM sequence: CTC
  source 1..20: mol_type = other DNA
agatttcccctaattgtata

SEQ ID NO: 15213 - DNA, 20 bp, synthetic construct
  misc_feature 1..20: note = Description of Artificial Sequence: Synthetic oligonucleotide
  misc_feature 1..20: note = Target: ANGPTL3; (+) strand; PAM type: YTN; PAM sequence: TTT
  source 1..20: mol_type = other DNA
cccctaattgtatattcagt

SEQ ID NO: 15214 - DNA, 20 bp, synthetic construct
  misc_feature 1..20: note = Description of Artificial Sequence: Synthetic oligonucleotide
  misc_feature 1..20: note = Target: ANGPTL3; (+) strand; PAM type: YTN; PAM sequence: TTC
  source 1..20: mol_type = other DNA
ccctaattgtatattcagta

SEQ ID NO: 15215 - DNA, 20 bp, synthetic construct
  misc_feature 1..20: note = Description of Artificial Sequence: Synthetic oligonucleotide
  misc_feature 1..20: note = Target: ANGPTL3; (+) strand; PAM type: YTN; PAM sequence: CTA
  source 1..20: mol_type = other DNA
attgtatattcagtatcatt

SEQ ID NO: 15216 - DNA, 20 bp, synthetic construct
  misc_feature 1..20: note = Description of Artificial Sequence: Synthetic oligonucleotide
  misc_feature 1..20: note = Target: ANGPTL3; (+) strand; PAM type: YTN; PAM sequence: TTG
  source 1..20: mol_type = other DNA
tatattcagtatcattttaa

SEQ ID NO: 15217 - DNA, 20 bp, synthetic construct
  misc_feature 1..20: note = Description of Artificial Sequence: Synthetic oligonucleotide
  misc_feature 1..20: note = Target: ANGPTL3; (+) strand; PAM type: YTN; PAM sequence: TTC
  source 1..20: mol_type = other DNA
agtatcattttaaaaaacag

SEQ ID NO: 15218 - DNA, 20 bp, synthetic construct
  misc_feature 1..20: note = Description of Artificial Sequence: Synthetic oligonucleotide
  misc_feature 1..20: note = Target: ANGPTL3; (+) strand; PAM type: YTN; PAM sequence: TTT
  source 1..20: mol_type = other DNA
taaaaaacagatttatattc

SEQ ID NO: 15219 - DNA, 20 bp, synthetic construct
  misc_feature 1..20: note = Description of Artificial Sequence: Synthetic oligonucleotide
  misc_feature 1..20: note = Target: ANGPTL3; (+) strand; PAM type: YTN; PAM sequence: TTT
  source 1..20: mol_type = other DNA
aaaaaacagatttatattct

SEQ ID NO: 15220 - DNA, 20 bp, synthetic construct
  misc_feature 1..20: note = Description of Artificial Sequence: Synthetic oligonucleotide
  misc_feature 1..20: note = Target: ANGPTL3; (+) strand; PAM type: YTN; PAM sequence: TTA
  source 1..20: mol_type = other DNA
aaaaacagatttatattctt

SEQ ID NO: 15221 - DNA, 20 bp, synthetic construct
  misc_feature 1..20: note = Description of Artificial Sequence: Synthetic oligonucleotide
  misc_feature 1..20: note = Target: ANGPTL3; (+) strand; PAM type: YTN; PAM sequence: TTT
  source 1..20: mol_type = other DNA
atattcttttatcagctcag

SEQ ID NO: 15222 - DNA, 20 bp, synthetic construct
  misc_feature 1..20: note = Description of Artificial Sequence: Synthetic oligonucleotide
  misc_feature 1..20: note = Target: ANGPTL3; (+) strand; PAM type: YTN; PAM sequence: TTA
  source 1..20: mol_type = other DNA
tattcttttatcagctcaga

SEQ ID NO: 15223 - DNA, 20 bp, synthetic construct
  misc_feature 1..20: note = Description of Artificial Sequence: Synthetic oligonucleotide
  misc_feature 1..20: note = Target: ANGPTL3; (+) strand; PAM type: YTN; PAM sequence: TTC
  source 1..20: mol_type = other DNA
ttttatcagctcagaaggac

SEQ ID NO: 15224 - DNA, 20 bp, synthetic construct
  misc_feature 1..20: note = Description of Artificial Sequence: Synthetic oligonucleotide
  misc_feature 1..20: note = Target: ANGPTL3; (+) strand; PAM type: YTN; PAM sequence: CTT
  source 1..20: mol_type = other DNA
ttatcagctcagaaggacta

SEQ ID NO: 15225 - DNA, 20 bp, synthetic construct
  misc_feature 1..20: note = Description of Artificial Sequence: Synthetic oligonucleotide
  misc_feature 1..20: note = Target: ANGPTL3; (+) strand; PAM type: YTN; PAM sequence: TTT
  source 1..20: mol_type = other DNA
tatcagctcagaaggactag

SEQ ID NO: 15226 - DNA, 20 bp, synthetic construct
  misc_feature 1..20: note = Description of Artificial Sequence: Synthetic oligonucleotide
  misc_feature 1..20: note = Target: ANGPTL3; (+) strand; PAM type: YTN; PAM sequence: TTT
  source 1..20: mol_type = other DNA
atcagctcagaaggactagt

SEQ ID NO: 15227 - DNA, 20 bp, synthetic construct
  misc_feature 1..20: note = Description of Artificial Sequence: Synthetic oligonucleotide
  misc_feature 1..20: note = Target: ANGPTL3; (+) strand; PAM type: YTN; PAM sequence: TTA
  source 1..20: mol_type = other DNA
tcagctcagaaggactagta

SEQ ID NO: 15228 - DNA, 20 bp, synthetic construct
  misc_feature 1..20: note = Description of Artificial Sequence: Synthetic oligonucleotide
  misc_feature 1..20: note = Target: ANGPTL3; (+) strand; PAM type: YTN; PAM sequence: CTC
  source 1..20: mol_type = other DNA
agaaggactagtattcaaga

SEQ ID NO: 15229 - DNA, 20 bp, synthetic construct
  misc_feature 1..20: note = Description of Artificial Sequence: Synthetic oligonucleotide
  misc_feature 1..20: note = Target: ANGPTL3; (+) strand; PAM type: YTN; PAM sequence: CTA
  source 1..20: mol_type = other DNA
gtattcaagaacccacagaa

SEQ ID NO: 15230 - DNA, 20 bp, synthetic construct
  misc_feature 1..20: note = Description of Artificial Sequence: Synthetic oligonucleotide
  misc_feature 1..20: note = Target: ANGPTL3; (+) strand; PAM type: YTN; PAM sequence: TTC
  source 1..20: mol_type = other DNA
aagaacccacagaaatttct

SEQ ID NO: 15231 - DNA, 20 bp, synthetic construct
  misc_feature 1..20: note = Description of Artificial Sequence: Synthetic oligonucleotide
  misc_feature 1..20: note = Target: ANGPTL3; (+) strand; PAM type: YTN; PAM sequence: TTT
  source 1..20: mol_type = other DNA
ctctatcttccaagccaaga

SEQ ID NO: 15232 - DNA, 20 bp, synthetic construct
  misc_feature 1..20: note = Description of Artificial Sequence: Synthetic oligonucleotide
  misc_feature 1..20: note = Target: ANGPTL3; (+) strand; PAM type: YTN; PAM sequence: TTC
  source 1..20: mol_type = other DNA
tctatcttccaagccaagag

SEQ ID NO: 15233 - DNA, 20 bp, synthetic construct
  misc_feature 1..20: note = Description of Artificial Sequence: Synthetic oligonucleotide
  misc_feature 1..20: note = Target: ANGPTL3; (+) strand; PAM type: YTN; PAM sequence: CTC
  source 1..20: mol_type = other DNA
tatcttccaagccaagagca

SEQ ID NO: 15234 - DNA, 20 bp, synthetic construct
  misc_feature 1..20: note = Description of Artificial Sequence: Synthetic oligonucleotide
  misc_feature 1..20: note = Target: ANGPTL3; (+) strand; PAM type: YTN; PAM sequence: CTA
  source 1..20: mol_type = other DNA
tcttccaagccaagagcacc

SEQ ID NO: 15235 - DNA, 20 bp, synthetic construct
  misc_feature 1..20: note = Description of Artificial Sequence: Synthetic oligonucleotide
  misc_feature 1..20: note = Target: ANGPTL3; (+) strand; PAM type: YTN; PAM sequence: CTT
  source 1..20: mol_type = other DNA
ccaagccaagagcaccaaga

SEQ ID NO: 15236 - DNA, 20 bp, synthetic construct
  misc_feature 1..20: note = Description of Artificial Sequence: Synthetic oligonucleotide
  misc_feature 1..20: note = Target: ANGPTL3; (+) strand; PAM type: YTN; PAM sequence: TTC
  source 1..20: mol_type = other DNA
caagccaagagcaccaagaa

SEQ ID NO: 15237 - DNA, 20 bp, synthetic construct
  misc_feature 1..20: note = Description of Artificial Sequence: Synthetic oligonucleotide
  misc_feature 1..20: note = Target: ANGPTL3; (+) strand; PAM type: YTN; PAM sequence: CTA
  source 1..20: mol_type = other DNA
ctccctttcttcagttgaat

SEQ ID NO: 15238 - DNA, 20 bp, synthetic construct
  misc_feature 1..20: note = Description of Artificial Sequence: Synthetic oligonucleotide
  misc_feature 1..20: note = Target: ANGPTL3; (+) strand; PAM type: YTN; PAM sequence: CTC
  source 1..20: mol_type = other DNA
cctttcttcagttgaatgaa

SEQ ID NO: 15239 - DNA, 20 bp, synthetic construct
  misc_feature 1..20: note = Description of Artificial Sequence: Synthetic oligonucleotide
  misc_feature 1..20: note = Target: ANGPTL3; (+) strand; PAM type: YTN; PAM sequence: CTT
  source 1..20: mol_type = other DNA
tcttcagttgaatgaaataa

SEQ ID NO: 15240 - DNA, 20 bp, synthetic construct
  misc_feature 1..20: note = Description of Artificial Sequence: Synthetic oligonucleotide
  misc_feature 1..20: note = Target: ANGPTL3; (+) strand; PAM type: YTN; PAM sequence: TTT
  source 1..20: mol_type = other DNA
cttcagttgaatgaaataag

SEQ ID NO: 15241 - DNA, 20 bp, synthetic construct
  misc_feature 1..20: note = Description of Artificial Sequence: Synthetic oligonucleotide
  misc_feature 1..20: note = Target: ANGPTL3; (+) strand; PAM type: YTN; PAM sequence: TTC
  source 1..20: mol_type = other DNA
ttcagttgaatgaaataaga

SEQ ID NO: 15242 - DNA, 20 bp, synthetic construct
  misc_feature 1..20: note = Description of Artificial Sequence: Synthetic oligonucleotide
  misc_feature 1..20: note = Target: ANGPTL3; (+) strand; PAM type: YTN; PAM sequence: CTT
  source 1..20: mol_type = other DNA
cagttgaatgaaataagaaa

SEQ ID NO: 15243 - DNA, 20 bp, synthetic construct
  misc_feature 1..20: note = Description of Artificial Sequence: Synthetic oligonucleotide
  misc_feature 1..20: note = Target: ANGPTL3; (+) strand; PAM type: YTN; PAM sequence: TTC
  source 1..20: mol_type = other DNA
agttgaatgaaataagaaat

SEQ ID NO: 15244 - DNA, 20 bp, synthetic construct
  misc_feature 1..20: note = Description of Artificial Sequence: Synthetic oligonucleotide
  misc_feature 1..20: note = Target: ANGPTL3; (+) strand; PAM type: YTN; PAM sequence: TTG
  source 1..20: mol_type = other DNA
aatgaaataagaaatgtaaa

SEQ ID NO: 15245 - DNA, 20 bp, synthetic construct
  misc_feature 1..20: note = Description of Artificial Sequence: Synthetic oligonucleotide
  misc_feature 1..20: note = Target: ANGPTL3; (+) strand; PAM type: YTN; PAM sequence: CTT
  source 1..20: mol_type = other DNA
tggtgggtttccttcttgaa

SEQ ID NO: 15246 - DNA, 20 bp, synthetic construct
  misc_feature 1..20: note = Description of Artificial Sequence: Synthetic oligonucleotide
  misc_feature 1..20: note = Target: ANGPTL3; (+) strand; PAM type: YTN; PAM sequence: TTT
  source 1..20: mol_type = other DNA
ggtgggtttccttcttgaag

SEQ ID NO: 15247 - DNA, 20 bp, synthetic construct
  misc_feature 1..20: note = Description of Artificial Sequence: Synthetic oligonucleotide
  misc_feature 1..20: note = Target: ANGPTL3; (+) strand; PAM type: YTN; PAM sequence: TTG
  source 1..20: mol_type = other DNA
gtgggtttccttcttgaagc

SEQ ID NO: 15248 - DNA, 20 bp, synthetic construct
  misc_feature 1..20: note = Description of Artificial Sequence: Synthetic oligonucleotide
  misc_feature 1..20: note = Target: ANGPTL3; (+) strand; PAM type: YTN; PAM sequence: TTT
  source 1..20: mol_type = other DNA
ccttcttgaagctattatta

SEQ ID NO: 15249 - DNA, 20 bp, synthetic construct
  misc_feature 1..20: note = Description of Artificial Sequence: Synthetic oligonucleotide
  misc_feature 1..20: note = Target: ANGPTL3; (+) strand; PAM type: YTN; PAM sequence: TTC
  source 1..20: mol_type = other DNA
cttcttgaagctattattat

SEQ ID NO: 15250 - DNA, 20 bp, synthetic construct
  misc_feature 1..20: note = Description of Artificial Sequence: Synthetic oligonucleotide
  misc_feature 1..20: note = Target: ANGPTL3; (+) strand; PAM type: YTN; PAM sequence: CTT
  source 1..20: mol_type = other DNA
cttgaagctattattatcaa

SEQ ID NO: 15251 - DNA, 20 bp, synthetic construct
  misc_feature 1..20: note = Description of Artificial Sequence: Synthetic oligonucleotide
  misc_feature 1..20: note = Target: ANGPTL3; (+) strand; PAM type: YTN; PAM sequence: TTC
  source 1..20: mol_type = other DNA
ttgaagctattattatcaaa

SEQ ID NO: 15252 - DNA, 20 bp, synthetic construct
  misc_feature 1..20: note = Description of Artificial Sequence: Synthetic oligonucleotide
  misc_feature 1..20: note = Target: ANGPTL3; (+) strand; PAM type: YTN; PAM sequence: CTT
  source 1..20: mol_type = other DNA
gaagctattattatcaaatt

SEQ ID NO: 15253 - DNA, 20 bp, synthetic construct
  misc_feature 1..20: note = Description of Artificial Sequence: Synthetic oligonucleotide
  misc_feature 1..20: note = Target: ANGPTL3; (+) strand; PAM type: YTN; PAM sequence: TTG
  source 1..20: mol_type = other DNA
aagctattattatcaaattc

SEQ ID NO: 15254 - DNA, 20 bp, synthetic construct
  misc_feature 1..20: note = Description of Artificial Sequence: Synthetic oligonucleotide
  misc_feature 1..20: note = Target: ANGPTL3; (+) strand; PAM type: YTN; PAM sequence: CTA
  source 1..20: mol_type = other DNA
ttattatcaaattccctatt

SEQ ID NO: 15255 - DNA, 20 bp, synthetic construct
  misc_feature 1..20: note = Description of Artificial Sequence: Synthetic oligonucleotide
  misc_feature 1..20: note = Target: ANGPTL3; (+) strand; PAM type: YTN; PAM sequence: TTA
  source 1..20: mol_type = other DNA
ttatcaaattccctattctt

SEQ ID NO: 15256 - DNA, 20 bp, synthetic construct
  misc_feature 1..20: note = Description of Artificial Sequence: Synthetic oligonucleotide
  misc_feature 1..20: note = Target: ANGPTL3; (+) strand; PAM type: YTN; PAM sequence: TTA
  source 1..20: mol_type = other DNA
tcaaattccctattcttagg

SEQ ID NO: 15257 - DNA, 20 bp, synthetic construct
  misc_feature 1..20: note = Description of Artificial Sequence: Synthetic oligonucleotide
  misc_feature 1..20: note = Target: ANGPTL3; (+) strand; PAM type: YTN; PAM sequence: TTC
  source 1..20: mol_type = other DNA
cctattcttaggacttgttc

SEQ ID NO: 15258 - DNA, 20 bp, synthetic construct
  misc_feature 1..20: note = Description of Artificial Sequence: Synthetic oligonucleotide
  misc_feature 1..20: note = Target: ANGPTL3; (+) strand; PAM type: YTN; PAM sequence: CTA
  source 1..20: mol_type = other DNA
ttcttaggacttgttctaga

SEQ ID NO: 15259 - DNA, 20 bp, synthetic construct
  misc_feature 1..20: note = Description of Artificial Sequence: Synthetic oligonucleotide
  misc_feature 1..20: note = Target: ANGPTL3; (+) strand; PAM type: YTN; PAM sequence: TTC
  source 1..20: mol_type = other DNA
ttaggacttgttctagacta

SEQ ID NO: 15260 - DNA, 20 bp, synthetic construct
  misc_feature 1..20: note = Description of Artificial Sequence: Synthetic oligonucleotide
  misc_feature 1..20: note = Target: ANGPTL3; (+) strand; PAM type: YTN; PAM sequence: CTT
  source 1..20: mol_type = other DNA
aggacttgttctagactaaa

SEQ ID NO: 15261 - DNA, 20 bp, synthetic construct
  misc_feature 1..20: note = Description of Artificial Sequence: Synthetic oligonucleotide
  misc_feature 1..20: note = Target: ANGPTL3; (+) strand; PAM type: YTN; PAM sequence: TTA
  source 1..20: mol_type = other DNA
ggacttgttctagactaaaa

SEQ ID NO: 15262 - DNA, 20 bp, synthetic construct
  misc_feature 1..20: note = Description of Artificial Sequence: Synthetic oligonucleotide
  misc_feature 1..20: note = Target: ANGPTL3; (+) strand; PAM type: YTN; PAM sequence: CTT
  source 1..20: mol_type = other DNA
gttctagactaaaagatagt

SEQ ID NO: 15263 - DNA, 20 bp, synthetic construct
  misc_feature 1..20: note = Description of Artificial Sequence: Synthetic oligonucleotide
  misc_feature 1..20: note = Target: ANGPTL3; (+) strand; PAM type: YTN; PAM sequence: TTG
  source 1..20: mol_type = other DNA
ttctagactaaaagatagtt

SEQ ID NO: 15264 - DNA, 20 bp, synthetic construct
  misc_feature 1..20: note = Description of Artificial Sequence: Synthetic oligonucleotide
  misc_feature 1..20: note = Target: ANGPTL3; (+) strand; PAM type: YTN; PAM sequence: TTC
  source 1..20: mol_type = other DNA
tagactaaaagatagttaag

SEQ ID NO: 15265 - DNA, 20 bp, synthetic construct
  misc_feature 1..20: note = Description of Artificial Sequence: Synthetic oligonucleotide
  misc_feature 1..20: note = Target: ANGPTL3; (+) strand; PAM type: YTN; PAM sequence: CTA
  source 1..20: mol_type = other DNA
gactaaaagatagttaagag

SEQ ID NO: 15266 - DNA, 20 bp, synthetic construct
  misc_feature 1..20: note = Description of Artificial Sequence: Synthetic oligonucleotide
  misc_feature 1..20: note = Target: ANGPTL3; (+) strand; PAM type: YTN; PAM sequence: CTA
  source 1..20: mol_type = other DNA
aaagatagttaagagatatc

SEQ ID NO: 15267 - DNA, 20 bp, synthetic construct
  misc_feature 1..20: note = Description of Artificial Sequence: Synthetic oligonucleotide
  misc_feature 1..20: note = Target: ANGPTL3; (+) strand; PAM type: YTN; PAM sequence: TTA
  source 1..20: mol_type = other DNA
agagatatccatcaaataca

SEQ ID NO: 15268 - DNA, 20 bp, synthetic construct
  misc_feature 1..20: note = Description of Artificial Sequence: Synthetic oligonucleotide
  misc_feature 1..20: note = Target: ANGPTL3; (+) strand; PAM type: YTN; PAM sequence: CTA
  source 1..20: mol_type = other DNA
aactggatgctggggttctt

SEQ ID NO: 15269 - DNA, 20 bp, synthetic construct
  misc_feature 1..20: note = Description of Artificial Sequence: Synthetic oligonucleotide
  misc_feature 1..20: note = Target: ANGPTL3; (+) strand; PAM type: YTN; PAM sequence: CTG
  source 1..20: mol_type = other DNA
gatgctggggttctttttac

SEQ ID NO: 15270 - DNA, 20 bp, synthetic construct
  misc_feature 1..20: note = Description of Artificial Sequence: Synthetic oligonucleotide
  misc_feature 1..20: note = Target: ANGPTL3; (+) strand; PAM type: YTN; PAM sequence: CTG
  source 1..20: mol_type = other DNA
gggttctttttacaccctat

SEQ ID NO: 15271 - DNA, 20 bp, synthetic construct
  misc_feature 1..20: note = Description of Artificial Sequence: Synthetic oligonucleotide
  misc_feature 1..20: note = Target: ANGPTL3; (+) strand; PAM type: YTN; PAM sequence: TTC
  source 1..20: mol_type = other DNA
tttttacaccctataaaaga

SEQ ID NO: 15272 - DNA, 20 bp, synthetic construct
  misc_feature 1..20: note = Description of Artificial Sequence: Synthetic oligonucleotide
  misc_feature 1..20: note = Target: ANGPTL3; (+) strand; PAM type: YTN; PAM sequence: CTT
  source 1..20: mol_type = other DNA
tttacaccctataaaagaca

SEQ ID NO: 15273 - DNA, 20 bp, synthetic construct
  misc_feature 1..20: note = Description of Artificial Sequence: Synthetic oligonucleotide
  misc_feature 1..20: note = Target: ANGPTL3; (+) strand; PAM type: YTN; PAM sequence: TTT
  source 1..20: mol_type = other DNA
ttacaccctataaaagacat

SEQ ID NO: 15274 - DNA, 20 bp, synthetic construct
  misc_feature 1..20: note = Description of Artificial Sequence: Synthetic oligonucleotide
  misc_feature 1..20: note = Target: ANGPTL3; (+) strand; PAM type: YTN; PAM sequence: TTT
  source 1..20: mol_type = other DNA
tacaccctataaaagacata

SEQ ID NO: 15275 - DNA, 20 bp, synthetic construct
  misc_feature 1..20: note = Description of Artificial Sequence: Synthetic oligonucleotide
  misc_feature 1..20: note = Target: ANGPTL3; (+) strand; PAM type: YTN; PAM sequence: TTT
  source 1..20: mol_type = other DNA
acaccctataaaagacatac

SEQ ID NO: 15276 - DNA, 20 bp, synthetic construct
  misc_feature 1..20: note = Description of Artificial Sequence: Synthetic oligonucleotide
  misc_feature 1..20: note = Target: ANGPTL3; (+) strand; PAM type: YTN; PAM sequence: TTA
  source 1..20: mol_type = other DNA
caccctataaaagacatacc

SEQ ID NO: 15277 - DNA, 20 bp, synthetic construct
  misc_feature 1..20: note = Description of Artificial Sequence: Synthetic oligonucleotide
  misc_feature 1..20: note = Target: ANGPTL3; (+) strand; PAM type: YTN; PAM sequence: CTA
  source 1..20: mol_type = other DNA
taaaagacatacctaagaca

SEQ ID NO: 15278 - DNA, 20 bp, synthetic construct
  misc_feature 1..20: note = Description of Artificial Sequence: Synthetic oligonucleotide
  misc_feature 1..20: note = Target: ANGPTL3; (+) strand; PAM type: YTN; PAM sequence: CTA
  source 1..20: mol_type = other DNA
agacaatcagagaaatacaa

SEQ ID NO: 15279 - DNA, 20 bp, synthetic construct
  misc_feature 1..20: note = Description of Artificial Sequence: Synthetic oligonucleotide
  misc_feature 1..20: note = Target: ANGPTL3; (+) strand; PAM type: YTN; PAM sequence: CTT
  source 1..20: mol_type = other DNA
gattattagataatatagaa

SEQ ID NO: 15280 - DNA, 20 bp, synthetic construct
  misc_feature 1..20: note = Description of Artificial Sequence: Synthetic oligonucleotide
  misc_feature 1..20: note = Target: ANGPTL3; (+) strand; PAM type: YTN; PAM sequence: TTG
  source 1..20: mol_type = other DNA
attattagataatatagaag

SEQ ID NO: 15281 - DNA, 20 bp, synthetic construct
  misc_feature 1..20: note = Description of Artificial Sequence: Synthetic oligonucleotide
  misc_feature 1..20: note = Target: ANGPTL3; (+) strand; PAM type: YTN; PAM sequence: TTA
  source 1..20: mol_type = other DNA
ttagataatatagaaggttt

SEQ ID NO: 15282 - DNA, 20 bp, synthetic construct
  misc_feature 1..20: note = Description of Artificial Sequence: Synthetic oligonucleotide
  misc_feature 1..20: note = Target: ANGPTL3; (+) strand; PAM type: YTN; PAM sequence: TTA
  source 1..20: mol_type = other DNA
gataatatagaaggtttatt

SEQ ID NO: 15283 - DNA, 20 bp, synthetic construct
  misc_feature 1..20: note = Description of Artificial Sequence: Synthetic oligonucleotide
  misc_feature 1..20: note = Target: ANGPTL3; (+) strand; PAM type: YTN; PAM sequence: TTT
  source 1..20: mol_type = other DNA
attaattttcttagatgtga

SEQ ID NO: 15284 - DNA, 20 bp, synthetic construct
  misc_feature 1..20: note = Description of Artificial Sequence: Synthetic oligonucleotide
  misc_feature 1..20: note = Target: ANGPTL3; (+) strand; PAM type: YTN; PAM sequence: TTA
  source 1..20: mol_type = other DNA
ttaattttcttagatgtgat

SEQ ID NO: 15285 - DNA, 20 bp, synthetic construct
  misc_feature 1..20: note = Description of Artificial Sequence: Synthetic oligonucleotide
  misc_feature 1..20: note = Target: ANGPTL3; (+) strand; PAM type: YTN; PAM sequence: TTA
  source 1..20: mol_type = other DNA
attttcttagatgtgatcat

SEQ ID NO: 15286 - DNA, 20 bp, synthetic construct
  misc_feature 1..20: note = Description of Artificial Sequence: Synthetic oligonucleotide
  misc_feature 1..20: note = Target: ANGPTL3; (+) strand; PAM type: YTN; PAM sequence: TTT
  source 1..20: mol_type = other DNA
tcttagatgtgatcatggta

SEQ ID NO: 15287 - DNA, 20 bp, synthetic construct
  misc_feature 1..20: note = Description of Artificial Sequence: Synthetic oligonucleotide
  misc_feature 1..20: note = Target: ANGPTL3; (+) strand; PAM type: YTN; PAM sequence: TTT
  source 1..20: mol_type = other DNA
cttagatgtgatcatggtat

SEQ ID NO: 15288 - DNA, 20 bp, synthetic construct
  misc_feature 1..20: note = Description of Artificial Sequence: Synthetic oligonucleotide
  misc_feature 1..20: note = Target: ANGPTL3; (+) strand; PAM type: YTN; PAM sequence: TTC
  source 1..20: mol_type = other DNA
ttagatgtgatcatggtatt

SEQ ID NO: 15289 - DNA, 20 bp, synthetic construct
  misc_feature 1..20: note = Description of Artificial Sequence: Synthetic oligonucleotide
  misc_feature 1..20: note = Target: ANGPTL3; (+) strand; PAM type: YTN; PAM sequence: CTT
  source 1..20: mol_type = other DNA
agatgtgatcatggtattgc

SEQ ID NO: 15290 - DNA, 20 bp, synthetic construct
  misc_feature 1..20: note = Description of Artificial Sequence: Synthetic oligonucleotide
  misc_feature 1..20: note = Target: ANGPTL3; (+) strand; PAM type: YTN; PAM sequence: TTA
  source 1..20: mol_type = other DNA
gatgtgatcatggtattgca

SEQ ID NO: 15291 - DNA, 20 bp, synthetic construct
  misc_feature 1..20: note = Description of Artificial Sequence: Synthetic oligonucleotide
  misc_feature 1..20: note = Target: ANGPTL3; (+) strand; PAM type: YTN; PAM sequence: TTG
  source 1..20: mol_type = other DNA
cagttttaaaggagaacaat

SEQ ID NO: 15292 - DNA, 20 bp, synthetic construct
  misc_feature 1..20: note = Description of Artificial Sequence: Synthetic oligonucleotide
  misc_feature 1..20: note = Target: ANGPTL3; (+) strand; PAM type: YTN; PAM sequence: TTT
  source 1..20: mol_type = other DNA
taaaggagaacaatctcctg

SEQ ID NO: 15293 - DNA, 20 bp, synthetic construct
  misc_feature 1..20: note = Description of Artificial Sequence: Synthetic oligonucleotide
  misc_feature 1..20: note = Target: ANGPTL3; (+) strand; PAM type: YTN; PAM sequence: TTT
  source 1..20: mol_type = other DNA
aaaggagaacaatctcctgt

SEQ ID NO: 15294 - DNA, 20 bp, synthetic construct
  misc_feature 1..20: note = Description of Artificial Sequence: Synthetic oligonucleotide
  misc_feature 1..20: note = Target: ANGPTL3; (+) strand; PAM type: YTN; PAM sequence: TTA
  source 1..20: mol_type = other DNA
aaggagaacaatctcctgtt

SEQ ID NO: 15295 - DNA, 20 bp, synthetic construct
  misc_feature 1..20: note = Description of Artificial Sequence: Synthetic oligonucleotide
  misc_feature 1..20: note = Target: ANGPTL3; (+) strand; PAM type: YTN; PAM sequence: CTC
  source 1..20: mol_type = other DNA
ctgtttaagagatacatgct

SEQ ID NO: 15296 - DNA, 20 bp, synthetic construct
  misc_feature 1..20: note = Description of Artificial Sequence: Synthetic oligonucleotide
  misc_feature 1..20: note = Target: ANGPTL3; (+) strand; PAM type: YTN; PAM sequence: CTG
  source 1..20: mol_type = other DNA
tttaagagatacatgctgaa

SEQ ID NO: 15297 - DNA, 20 bp, synthetic construct
  misc_feature 1..20: note = Description of Artificial Sequence: Synthetic oligonucleotide
  misc_feature 1..20: note = Target: ANGPTL3; (+) strand; PAM type: YTN; PAM sequence: TTT
  source 1..20: mol_type = other DNA
aagagatacatgctgaaata

SEQ ID NO: 15298 - DNA, 20 bp, synthetic construct
  misc_feature 1..20: note = Description of Artificial Sequence: Synthetic oligonucleotide
  misc_feature 1..20: note = Target: ANGPTL3; (+) strand; PAM type: YTN; PAM sequence: TTA
  source 1..20: mol_type = other DNA
agagatacatgctgaaatat

SEQ ID NO: 15299 - DNA, 20 bp, synthetic construct
  misc_feature 1..20: note = Description of Artificial Sequence: Synthetic oligonucleotide
  misc_feature 1..20: note = Target: ANGPTL3; (+) strand; PAM type: YTN; PAM sequence: CTG
  source 1..20: mol_type = other DNA
aaatatttacggagttaaag

SEQ ID NO: 15300 - DNA, 20 bp, synthetic construct
  misc_feature 1..20: note = Description of Artificial Sequence: Synthetic oligonucleotide
  misc_feature 1..20: note = Target: ANGPTL3; (+) strand; PAM type: YTN; PAM sequence: TTT
  source 1..20: mol_type = other DNA
acggagttaaaggtcactgg

SEQ ID NO: 15301 - DNA, 20 bp, synthetic construct
  misc_feature 1..20: note = Description of Artificial Sequence: Synthetic oligonucleotide
  misc_feature 1..20: note = Target: ANGPTL3; (+) strand; PAM type: YTN; PAM sequence: TTA
  source 1..20: mol_type = other DNA
cggagttaaaggtcactgga

SEQ ID NO: 15302 - DNA, 20 bp, synthetic construct
  misc_feature 1..20: note = Description of Artificial Sequence: Synthetic oligonucleotide
  misc_feature 1..20: note = Target: ANGPTL3; (+) strand; PAM type: YTN; PAM sequence: TTA
  source 1..20: mol_type = other DNA
aaggtcactggactccagac

SEQ ID NO: 15303 - DNA, 20 bp, synthetic construct
  misc_feature 1..20: note = Description of Artificial Sequence: Synthetic oligonucleotide
  misc_feature 1..20: note = Target: ANGPTL3; (+) strand; PAM type: YTN; PAM sequence: CTG
  source 1..20: mol_type = other DNA
gactccagactggtgataga

SEQ ID NO: 15304 - DNA, 20 bp, synthetic construct
  misc_feature 1..20: note = Description of Artificial Sequence: Synthetic oligonucleotide
  misc_feature 1..20: note = Target: ANGPTL3; (+) strand; PAM type: YTN; PAM sequence: CTC
  source 1..20: mol_type = other DNA
cagactggtgatagaacaag

SEQ ID NO: 15305 - DNA, 20 bp, synthetic construct
  misc_feature 1..20: note = Description of Artificial Sequence: Synthetic oligonucleotide
  misc_feature 1..20: note = Target: ANGPTL3; (+) strand; PAM type: YTN; PAM sequence: CTG
  source 1..20: mol_type = other DNA
gtgatagaacaagactctgt

SEQ ID NO: 15306 - DNA, 20 bp, synthetic construct
  misc_feature 1..20: note = Description of Artificial Sequence: Synthetic oligonucleotide
  misc_feature 1..20: note = Target: ANGPTL3; (+) strand; PAM type: YTN; PAM sequence: CTC
  source 1..20: mol_type = other DNA
tgtctctaaaaaataattaa

SEQ ID NO: 15307 - DNA, 20 bp, synthetic construct
  misc_feature 1..20: note = Description of Artificial Sequence: Synthetic oligonucleotide
  misc_feature 1..20: note = Target: ANGPTL3; (+) strand; PAM type: YTN; PAM sequence: CTG
  source 1..20: mol_type = other DNA
tctctaaaaaataattaatt

SEQ ID NO: 15308 - DNA, 20 bp, synthetic construct
  misc_feature 1..20: note = Description of Artificial Sequence: Synthetic oligonucleotide
  misc_feature 1..20: note = Target: ANGPTL3; (+) strand; PAM type: YTN; PAM sequence: CTC
  source 1..20: mol_type = other DNA
taaaaaataattaatttttt

SEQ ID NO: 15309 - DNA, 20 bp, synthetic construct
  misc_feature 1..20: note = Description of Artificial Sequence: Synthetic oligonucleotide
  misc_feature 1..20: note = Target: ANGPTL3; (+) strand; PAM type: YTN; PAM sequence: CTA
  source 1..20: mol_type = other DNA
aaaaataattaattttttaa

SEQ ID NO: 15310 - DNA, 20 bp, synthetic construct
  misc_feature 1..20: note = Description of Artificial Sequence: Synthetic oligonucleotide
  misc_feature 1..20: note = Target: ANGPTL3; (+) strand; PAM type: YTN; PAM sequence: TTA
  source 1..20: mol_type = other DNA
attttttaaaagaaaatagt

SEQ ID NO: 15311 - DNA, 20 bp, synthetic construct
  misc_feature 1..20: note = Description of Artificial Sequence: Synthetic oligonucleotide
  misc_feature 1..20: note = Target: ANGPTL3; (+) strand; PAM type: YTN; PAM sequence: TTT
  source 1..20: mol_type = other DNA
tttaaaagaaaatagtttgg

SEQ ID NO: 15312 - DNA, 20 bp, synthetic construct
  misc_feature 1..20: note = Description of Artificial Sequence: Synthetic oligonucleotide
  misc_feature 1..20: note = Target: ANGPTL3; (+) strand; PAM type: YTN; PAM sequence: TTT
  source 1..20: mol_type = other DNA
ttaaaagaaaatagtttggt

SEQ ID NO: 15313 - DNA, 20 bp, synthetic construct
  misc_feature 1..20: note = Description of Artificial Sequence: Synthetic oligonucleotide
  misc_feature 1..20: note = Target: ANGPTL3; (+) strand; PAM type: YTN; PAM sequence: TTT
  source 1..20: mol_type = other DNA
taaaagaaaatagtttggta

SEQ ID NO: 15314 - DNA, 20 bp, synthetic construct
  misc_feature 1..20: note = Description of Artificial Sequence: Synthetic oligonucleotide
  misc_feature 1..20: note = Target: ANGPTL3; (+) strand; PAM type: YTN; PAM sequence: TTT
  source 1..20: mol_type = other DNA
aaaagaaaatagtttggtaa

SEQ ID NO: 15315 - DNA, 20 bp, synthetic construct
  misc_feature 1..20: note = Description of Artificial Sequence: Synthetic oligonucleotide
  misc_feature 1..20: note = Target: ANGPTL3; (+) strand; PAM type: YTN; PAM sequence: TTA
  source 1..20: mol_type = other DNA
aaagaaaatagtttggtaag

SEQ ID NO: 15316 - DNA, 20 bp, synthetic construct
  misc_feature 1..20: note = Description of Artificial Sequence: Synthetic oligonucleotide
  misc_feature 1..20: note = Target: ANGPTL3; (+) strand; PAM type: YTN; PAM sequence: TTT
  source 1..20: mol_type = other DNA
ggtaagatgattcttacatt

SEQ ID NO: 15317 - DNA, 20 bp, synthetic construct
  misc_feature 1..20: note = Description of Artificial Sequence: Synthetic oligonucleotide
  misc_feature 1..20: note = Target: ANGPTL3; (+) strand; PAM type: YTN; PAM sequence: TTG
  source 1..20: mol_type = other DNA
gtaagatgattcttacattc

SEQ ID NO: 15318 - DNA, 20 bp, synthetic construct
  misc_feature 1..20: note = Description of Artificial Sequence: Synthetic oligonucleotide
  misc_feature 1..20: note = Target: ANGPTL3; (+) strand; PAM type: YTN; PAM sequence: TTC
  source 1..20: mol_type = other DNA
ttacattcttaaataacacg

SEQ ID NO: 15319 - DNA, 20 bp, synthetic construct
  misc_feature 1..20: note = Description of Artificial Sequence: Synthetic oligonucleotide
  misc_feature 1..20: note = Target: ANGPTL3; (+) strand; PAM type: YTN; PAM sequence: CTT
  source 1..20: mol_type = other DNA
acattcttaaataacacgcc

SEQ ID NO: 15320 - DNA, 20 bp, synthetic construct
  misc_feature 1..20: note = Description of Artificial Sequence: Synthetic oligonucleotide
  misc_feature 1..20: note = Target: ANGPTL3; (+) strand; PAM type: YTN; PAM sequence: TTA
  source 1..20: mol_type = other DNA
cattcttaaataacacgcca

SEQ ID NO: 15321 - DNA, 20 bp, synthetic construct
  misc_feature 1..20: note = Description of Artificial Sequence: Synthetic oligonucleotide
  misc_feature 1..20: note = Target: ANGPTL3; (+) strand; PAM type: YTN; PAM sequence: TTC
  source 1..20: mol_type = other DNA
ttaaataacacgccatctaa

SEQ ID NO: 15322 - DNA, 20 bp, synthetic construct
  misc_feature 1..20: note = Description of Artificial Sequence: Synthetic oligonucleotide
  misc_feature 1..20: note = Target: ANGPTL3; (+) strand; PAM type: YTN; PAM sequence: CTT
  source 1..20: mol_type = other DNA
aaataacacgccatctaaga

SEQ ID NO: 15323 - DNA, 20 bp, synthetic construct
  misc_feature 1..20: note = Description of Artificial Sequence: Synthetic oligonucleotide
  misc_feature 1..20: note = Target: ANGPTL3; (+) strand; PAM type: YTN; PAM sequence: TTA
  source 1..20: mol_type = other DNA
aataacacgccatctaagaa

SEQ ID NO: 15324 - DNA, 20 bp, synthetic construct
  misc_feature 1..20: note = Description of Artificial Sequence: Synthetic oligonucleotide
  misc_feature 1..20: note = Target: ANGPTL3; (+) strand; PAM type: YTN; PAM sequence: CTA
  source 1..20: mol_type = other DNA
agaaaaatgctttaacataa

SEQ ID NO: 15325 - DNA, 20 bp, synthetic construct
  misc_feature 1..20: note = Description of Artificial Sequence: Synthetic oligonucleotide
  misc_feature 1..20: note = Target: ANGPTL3; (+) strand; PAM type: YTN; PAM sequence: CTT
  source 1..20: mol_type = other DNA
taacataaacattactgaaa

SEQ ID NO: 15326 - DNA, 20 bp, synthetic construct
  misc_feature 1..20: note = Description of Artificial Sequence: Synthetic oligonucleotide
  misc_feature 1..20: note = Target: ANGPTL3; (+) strand; PAM type: YTN; PAM sequence: TTT
  source 1..20: mol_type = other DNA
aacataaacattactgaaaa

SEQ ID NO: 15327 - DNA, 20 bp, synthetic construct
  misc_feature 1..20: note = Description of Artificial Sequence: Synthetic oligonucleotide
  misc_feature 1..20: note = Target: ANGPTL3; (+) strand; PAM type: YTN; PAM sequence: TTA
  source 1..20: mol_type = other DNA
acataaacattactgaaaaa

SEQ ID NO: 15328 - DNA, 20 bp, synthetic construct
  misc_feature 1..20: note = Description of Artificial Sequence: Synthetic oligonucleotide
  misc_feature 1..20: note = Target: ANGPTL3; (+) strand; PAM type: YTN; PAM sequence: TTA
  source 1..20: mol_type = other DNA
ctgaaaaaatgctacatttg

SEQ ID NO: 15329 - DNA, 20 bp, synthetic construct
  misc_feature 1..20: note = Description of Artificial Sequence: Synthetic oligonucleotide
  misc_feature 1..20: note = Target: ANGPTL3; (+) strand; PAM type: YTN; PAM sequence: CTG
  source 1..20: mol_type = other DNA
aaaaaatgctacatttgcca

SEQ ID NO: 15330 - DNA, 20 bp, synthetic construct
  misc_feature 1..20: note = Description of Artificial Sequence: Synthetic oligonucleotide
  misc_feature 1..20: note = Target: ANGPTL3; (+) strand; PAM type: YTN; PAM sequence: CTA
  source 1..20: mol_type = other DNA
catttgccacaacttcataa

SEQ ID NO: 15331 - DNA, 20 bp, synthetic construct
  misc_feature 1..20: note = Description of Artificial Sequence: Synthetic oligonucleotide
  misc_feature 1..20: note = Target: ANGPTL3; (+) strand; PAM type: YTN; PAM sequence: TTT
  source 1..20: mol_type = other DNA
gccacaacttcataaaatgt

SEQ ID NO: 15332 - DNA, 20 bp, synthetic construct
  misc_feature 1..20: note = Description of Artificial Sequence: Synthetic oligonucleotide
  misc_feature 1..20: note = Target: ANGPTL3; (+) strand; PAM type: YTN; PAM sequence: TTG
  source 1..20: mol_type = other DNA
ccacaacttcataaaatgtc

SEQ ID NO: 15333 - DNA, 20 bp, synthetic construct
  misc_feature 1..20: note = Description of Artificial Sequence: Synthetic oligonucleotide
  misc_feature 1..20: note = Target: ANGPTL3; (+) strand; PAM type: YTN; PAM sequence: CTT
  source 1..20: mol_type = other DNA
cataaaatgtcaagtgaaat

SEQ ID NO: 15334 - DNA, 20 bp, synthetic construct
  misc_feature 1..20: note = Description of Artificial Sequence: Synthetic oligonucleotide
  misc_feature 1..20: note = Target: ANGPTL3; (+) strand; PAM type: YTN; PAM sequence: TTC
  source 1..20: mol_type = other DNA
ataaaatgtcaagtgaaatc

SEQ ID NO: 15335 - DNA, 20 bp, synthetic construct
  misc_feature 1..20: note = Description of Artificial Sequence: Synthetic oligonucleotide
  misc_feature 1..20: note = Target: ANGPTL3; (+) strand; PAM type: YTN; PAM sequence: CTC
  source 1..20: mol_type = other DNA
aagctccaaagatattattc

SEQ ID NO: 15336 - DNA, 20 bp, synthetic construct
  misc_feature 1..20: note = Description of Artificial Sequence: Synthetic oligonucleotide
  misc_feature 1..20: note = Target: ANGPTL3; (+) strand; PAM type: YTN; PAM sequence: CTC
  source 1..20: mol_type = other DNA
caaagatattattcctatta

SEQ ID NO: 15337 - DNA, 20 bp, synthetic construct
  misc_feature 1..20: note = Description of Artificial Sequence: Synthetic oligonucleotide
  misc_feature 1..20: note = Target: ANGPTL3; (+) strand; PAM type: YTN; PAM sequence: TTA
  source 1..20: mol_type = other DNA
ttcctattactaaatctgat

SEQ ID NO: 15338 - DNA, 20 bp, synthetic construct
  misc_feature 1..20: note = Description of Artificial Sequence: Synthetic oligonucleotide
  misc_feature 1..20: note = Target: ANGPTL3; (+) strand; PAM type: YTN; PAM sequence: TTC
  source 1..20: mol_type = other DNA
ctattactaaatctgatgta

SEQ ID NO: 15339 - DNA, 20 bp, synthetic construct
  misc_feature 1..20: note = Description of Artificial Sequence: Synthetic oligonucleotide
  misc_feature 1..20: note = Target: ANGPTL3; (+) strand; PAM type: YTN; PAM sequence: CTA
  source 1..20: mol_type = other DNA
ttactaaatctgatgtaata

SEQ ID NO: 15340 - DNA, 20 bp, synthetic construct
  misc_feature 1..20: note = Description of Artificial Sequence: Synthetic oligonucleotide
  misc_feature 1..20: note = Target: ANGPTL3; (+) strand; PAM type: YTN; PAM sequence: TTA
  source 1..20: mol_type = other DNA
ctaaatctgatgtaataaca

SEQ ID NO: 15341 - DNA, 20 bp, synthetic construct
  misc_feature 1..20: note = Description of Artificial Sequence: Synthetic oligonucleotide
  misc_feature 1..20: note = Target: ANGPTL3; (+) strand; PAM type: YTN; PAM sequence: CTA
  source 1..20: mol_type = other DNA
aatctgatgtaataacattt

SEQ ID NO: 15342 - DNA, 20 bp, synthetic construct
  misc_feature 1..20: note = Description of Artificial Sequence: Synthetic oligonucleotide
  misc_feature 1..20: note = Target: ANGPTL3; (+) strand; PAM type: YTN; PAM sequence: CTG
  source 1..20: mol_type = other DNA
atgtaataacattttattga

SEQ ID NO: 15343 - DNA, 20 bp, synthetic construct
  misc_feature 1..20: note = Description of Artificial Sequence: Synthetic oligonucleotide
  misc_feature 1..20: note = Target: ANGPTL3; (+) strand; PAM type: YTN; PAM sequence: TTT
  source 1..20: mol_type = other DNA
tattgattctaggcattcct

SEQ ID NO: 15344 - DNA, 20 bp, synthetic construct
  misc_feature 1..20: note = Description of Artificial Sequence: Synthetic oligonucleotide
  misc_feature 1..20: note = Target: ANGPTL3; (+) strand; PAM type: YTN; PAM sequence: TTT
  source 1..20: mol_type = other DNA
attgattctaggcattcctg

SEQ ID NO: 15345 - DNA, 20 bp, synthetic construct
  misc_feature 1..20: note = Description of Artificial Sequence: Synthetic oligonucleotide
  misc_feature 1..20: note = Target: ANGPTL3; (+) strand; PAM type: YTN; PAM sequence: TTA
  source 1..20: mol_type = other DNA
ttgattctaggcattcctgc

SEQ ID NO: 15346 - DNA, 20 bp, synthetic construct
  misc_feature 1..20: note = Description of Artificial Sequence: Synthetic oligonucleotide
  misc_feature 1..20: note = Target: ANGPTL3; (+) strand; PAM type: YTN; PAM sequence: TTG
  source 1..20: mol_type = other DNA
attctaggcattcctgctga

SEQ ID NO: 15347 - DNA, 20 bp, synthetic construct
  misc_feature 1..20: note = Description of Artificial Sequence: Synthetic oligonucleotide
  misc_feature 1..20: note = Target: ANGPTL3; (+) strand; PAM type: YTN; PAM sequence: TTC
  source 1..20: mol_type = other DNA
taggcattcctgctgaatgt

SEQ ID NO: 15348 - DNA, 20 bp, synthetic construct
  misc_feature 1..20: note = Description of Artificial Sequence: Synthetic oligonucleotide
  misc_feature 1..20: note = Target: ANGPTL3; (+) strand; PAM type: YTN; PAM sequence: CTA
  source 1..20: mol_type = other DNA
ggcattcctgctgaatgtac

SEQ ID NO: 15349 - DNA, 20 bp, synthetic construct
  misc_feature 1..20: note = Description of Artificial Sequence: Synthetic oligonucleotide
  misc_feature 1..20: note = Target: ANGPTL3; (+) strand; PAM type: YTN; PAM sequence: TTC
  source 1..20: mol_type = other DNA
ctgctgaatgtaccaccatt

SEQ ID NO: 15350 - DNA, 20 bp, synthetic construct
  misc_feature 1..20: note = Description of Artificial Sequence: Synthetic oligonucleotide
  misc_feature 1..20: note = Target: ANGPTL3; (+) strand; PAM type: YTN; PAM sequence: CTG
  source 1..20: mol_type = other DNA
ctgaatgtaccaccatttat

SEQ ID NO: 15351 - DNA, 20 bp, synthetic construct
  misc_feature 1..20: note = Description of Artificial Sequence: Synthetic oligonucleotide
  misc_feature 1..20: note = Target: ANGPTL3; (+) strand; PAM type: YTN; PAM sequence: CTG
  source 1..20: mol_type = other DNA
aatgtaccaccatttataac

SEQ ID NO: 15352 - DNA, 20 bp, synthetic construct
  misc_feature 1..20: note = Description of Artificial Sequence: Synthetic oligonucleotide
  misc_feature 1..20: note = Target: ANGPTL3; (+) strand; PAM type: YTN; PAM sequence: TTT
  source 1..20: mol_type = other DNA
ataacagaggtgaacataca

SEQ ID NO: 15353 - DNA, 20 bp, synthetic construct
  misc_feature 1..20: note = Description of Artificial Sequence: Synthetic oligonucleotide
  misc_feature 1..20: note = Target: ANGPTL3; (+) strand; PAM type: YTN; PAM sequence: TTA
  source 1..20: mol_type = other DNA
taacagaggtgaacatacaa

SEQ ID NO: 15354 - DNA, 20 bp, synthetic construct
  misc_feature 1..20: note = Description of Artificial Sequence: Synthetic oligonucleotide
  misc_feature 1..20: note = Target: ANGPTL3; (+) strand; PAM type: YTN; PAM sequence: CTC
  source 1..20: mol_type = other DNA
tcaagtttttcatgtctact

SEQ ID NO: 15355 - DNA, 20 bp, synthetic construct
  misc_feature 1..20: note = Description of Artificial Sequence: Synthetic oligonucleotide
  misc_feature 1..20: note = Target: ANGPTL3; (+) strand; PAM type: YTN; PAM sequence: CTC
  source 1..20: mol_type = other DNA
aagtttttcatgtctactgt

SEQ ID NO: 15356 - DNA, 20 bp, synthetic construct
  misc_feature 1..20: note = Description of Artificial Sequence: Synthetic oligonucleotide
  misc_feature 1..20: note = Target: ANGPTL3; (+) strand; PAM type: YTN; PAM sequence: TTT
  source 1..20: mol_type = other DNA
ttcatgtctactgtgatgtt

SEQ ID NO: 15357 - DNA, 20 bp, synthetic construct
  misc_feature 1..20: note = Description of Artificial Sequence: Synthetic oligonucleotide
  misc_feature 1..20: note = Target: ANGPTL3; (+) strand; PAM type: YTN; PAM sequence: TTT
  source 1..20: mol_type = other DNA
tcatgtctactgtgatgtta

SEQ ID NO: 15358 - DNA, 20 bp, synthetic construct
  misc_feature 1..20: note = Description of Artificial Sequence: Synthetic oligonucleotide
  misc_feature 1..20: note = Target: ANGPTL3; (+) strand; PAM type: YTN; PAM sequence: TTT
  source 1..20: mol_type = other DNA
catgtctactgtgatgttat

SEQ ID NO: 15359 - DNA, 20 bp, synthetic construct
  misc_feature 1..20: note = Description of Artificial Sequence: Synthetic oligonucleotide
  misc_feature 1..20: note = Target: ANGPTL3; (+) strand; PAM type: YTN; PAM sequence: TTC
  source 1..20: mol_type = other DNA
atgtctactgtgatgttata

SEQ ID NO: 15360 - DNA, 20 bp, synthetic construct
  misc_feature 1..20: note = Description of Artificial Sequence: Synthetic oligonucleotide
  misc_feature 1..20: note = Target: ANGPTL3; (+) strand; PAM type: YTN; PAM sequence: CTA
  source 1..20: mol_type = other DNA
ctgtgatgttatatcaggta

SEQ ID NO: 15361 - DNA, 20 bp, synthetic construct
  misc_feature 1..20: note = Description of Artificial Sequence: Synthetic oligonucleotide
  misc_feature 1..20: note = Target: ANGPTL3; (+) strand; PAM type: YTN; PAM sequence: CTG
  source 1..20: mol_type = other DNA
tgatgttatatcaggtaaaa

SEQ ID NO: 15362 - DNA, 20 bp, synthetic construct
  misc_feature 1..20: note = Description of Artificial Sequence: Synthetic oligonucleotide
  misc_feature 1..20: note = Target: ANGPTL3; (+) strand; PAM type: YTN; PAM sequence: TTA
  source 1..20: mol_type = other DNA
tatcaggtaaaacctgtcta

SEQ ID NO: 15363 - DNA, 20 bp, synthetic construct
  misc_feature 1..20: note = Description of Artificial Sequence: Synthetic oligonucleotide
  misc_feature 1..20: note = Target: ANGPTL3; (+) strand; PAM type: YTN; PAM sequence: CTG
  source 1..20: mol_type = other DNA
tctaaggagaatagacagta

SEQ ID NO: 15364 - DNA, 20 bp, synthetic construct
  misc_feature 1..20: note = Description of Artificial Sequence: Synthetic oligonucleotide
  misc_feature 1..20: note = Target: ANGPTL3; (+) strand; PAM type: YTN; PAM sequence: CTA
  source 1..20: mol_type = other DNA
aggagaatagacagtagtta

SEQ ID NO: 15365 - DNA, 20 bp, synthetic construct
  misc_feature 1..20: note = Description of Artificial Sequence: Synthetic oligonucleotide
  misc_feature 1..20: note = Target: ANGPTL3; (+) strand; PAM type: YTN; PAM sequence: TTA
  source 1..20: mol_type = other DNA
gttcaacttactcattacgt

SEQ ID NO: 15366 - DNA, 20 bp, synthetic construct
  misc_feature 1..20: note = Description of Artificial Sequence: Synthetic oligonucleotide
  misc_feature 1..20: note = Target: ANGPTL3; (+) strand; PAM type: YTN; PAM sequence: TTC
  source 1..20: mol_type = other DNA
aacttactcattacgtatta

SEQ ID NO: 15367 - DNA, 20 bp, synthetic construct
  misc_feature 1..20: note = Description of Artificial Sequence: Synthetic oligonucleotide
  misc_feature 1..20: note = Target: ANGPTL3; (+) strand; PAM type: YTN; PAM sequence: CTT
  source 1..20: mol_type = other DNA
actcattacgtattaggaag

SEQ ID NO: 15368 - DNA, 20 bp, synthetic construct
  misc_feature 1..20: note = Description of Artificial Sequence: Synthetic oligonucleotide
  misc_feature 1..20: note = Target: ANGPTL3; (+) strand; PAM type: YTN; PAM sequence: TTA
  source 1..20: mol_type = other DNA
ctcattacgtattaggaaga

SEQ ID NO: 15369 - DNA, 20 bp, synthetic construct
  misc_feature 1..20: note = Description of Artificial Sequence: Synthetic oligonucleotide
  misc_feature 1..20: note = Target: ANGPTL3; (+) strand; PAM type: YTN; PAM sequence: CTC
  source 1..20: mol_type = other DNA
attacgtattaggaagatta

SEQ ID NO: 15370 - DNA, 20 bp, synthetic construct
  misc_feature 1..20: note = Description of Artificial Sequence: Synthetic oligonucleotide
  misc_feature 1..20: note = Target: ANGPTL3; (+) strand; PAM type: YTN; PAM sequence: TTA
  source 1..20: mol_type = other DNA
cgtattaggaagattaacct

SEQ ID NO: 15371 - DNA, 20 bp, synthetic construct
  misc_feature 1..20: note = Description of Artificial Sequence: Synthetic oligonucleotide
  misc_feature 1..20: note = Target: ANGPTL3; (+) strand; PAM type: YTN; PAM sequence: TTA
  source 1..20: mol_type = other DNA
ggaagattaacctggttatc

SEQ ID NO: 15372 - DNA, 20 bp, synthetic construct
  misc_feature 1..20: note = Description of Artificial Sequence: Synthetic oligonucleotide
  misc_feature 1..20: note = Target: ANGPTL3; (+) strand; PAM type: YTN; PAM sequence: TTA
  source 1..20: mol_type = other DNA
acctggttatcattgtttta

SEQ ID NO: 15373 - DNA, 20 bp, synthetic construct
  misc_feature 1..20: note = Description of Artificial Sequence: Synthetic oligonucleotide
  misc_feature 1..20: note = Target: ANGPTL3; (+) strand; PAM type: YTN; PAM sequence: CTG
  source 1..20: mol_type = other DNA
gttatcattgttttatacat

SEQ ID NO: 15374 - DNA, 20 bp, synthetic construct
  misc_feature 1..20: note = Description of Artificial Sequence: Synthetic oligonucleotide
  misc_feature 1..20: note = Target: ANGPTL3; (+) strand; PAM type: YTN; PAM sequence: TTA
  source 1..20: mol_type = other DNA
tcattgttttatacatatat

SEQ ID NO: 15375 - DNA, 20 bp, synthetic construct
  misc_feature 1..20: note = Description of Artificial Sequence: Synthetic oligonucleotide
  misc_feature 1..20: note = Target: ANGPTL3; (+) strand; PAM type: YTN; PAM sequence: TTG
  source 1..20: mol_type = other DNA
ttttatacatatatatatga

SEQ ID NO: 15376 - DNA, 20 bp, synthetic construct
  misc_feature 1..20: note = Description of Artificial Sequence: Synthetic oligonucleotide
  misc_feature 1..20: note = Target: ANGPTL3; (+) strand; PAM type: YTN; PAM sequence: TTT
  source 1..20: mol_type = other DNA
tatacatatatatatgaaat

SEQ ID NO: 15377 - DNA, 20 bp, synthetic construct
  misc_feature 1..20: note = Description of Artificial Sequence: Synthetic oligonucleotide
  misc_feature 1..20: note = Target: ANGPTL3; (+) strand; PAM type: YTN; PAM sequence: TTT
  source 1..20: mol_type = other DNA
atacatatatatatgaaata

SEQ ID NO: 15378 - DNA, 20 bp, synthetic construct
  misc_feature 1..20: note = Description of Artificial Sequence: Synthetic oligonucleotide
  misc_feature 1..20: note = Target: ANGPTL3; (+) strand; PAM type: YTN; PAM sequence: TTA
  source 1..20: mol_type = other DNA
tacatatatatatgaaatat

SEQ ID NO: 15379 - DNA, 20 bp, synthetic construct
  misc_feature 1..20: note = Description of Artificial Sequence: Synthetic oligonucleotide
  misc_feature 1..20: note = Target: ANGPTL3; (+) strand; PAM type: YTN; PAM sequence: TTC
  source 1..20: mol_type = other DNA
gtataaatataatactttta

SEQ ID NO: 15380 - DNA, 20 bp, synthetic construct
  misc_feature 1..20: note = Description of Artificial Sequence: Synthetic oligonucleotide
  misc_feature 1..20: note = Target: ANGPTL3; (+) strand; PAM type: YTN; PAM sequence: CTT
  source 1..20: mol_type = other DNA
ttaccttgtttatgtattta

SEQ ID NO: 15381 - DNA, 20 bp, synthetic construct
  misc_feature 1..20: note = Description of Artificial Sequence: Synthetic oligonucleotide
  misc_feature 1..20: note = Target: ANGPTL3; (+) strand; PAM type: YTN; PAM sequence: TTT
  source 1..20: mol_type = other DNA
taccttgtttatgtatttac

SEQ ID NO: 15382 - DNA, 20 bp, synthetic construct
  misc_feature 1..20: note = Description of Artificial Sequence: Synthetic oligonucleotide
  misc_feature 1..20: note = Target: ANGPTL3; (+) strand; PAM type: YTN; PAM sequence: TTT
  source 1..20: mol_type = other DNA
accttgtttatgtatttact

SEQ ID NO: 15383 - DNA, 20 bp, synthetic construct
  misc_feature 1..20: note = Description of Artificial Sequence: Synthetic oligonucleotide
  misc_feature 1..20: note = Target: ANGPTL3; (+) strand; PAM type: YTN; PAM sequence: TTA
  source 1..20: mol_type = other DNA
ccttgtttatgtatttactc

SEQ ID NO: 15384 - DNA, 20 bp, synthetic construct
  misc_feature 1..20: note = Description of Artificial Sequence: Synthetic oligonucleotide
  misc_feature 1..20: note = Target: ANGPTL3; (+) strand; PAM type: YTN; PAM sequence: CTT
  source 1..20: mol_type = other DNA
gtttatgtatttactcaata

SEQ ID NO: 15385 - DNA, 20 bp, synthetic construct
  misc_feature 1..20: note = Description of Artificial Sequence: Synthetic oligonucleotide
  misc_feature 1..20: note = Target: ANGPTL3; (+) strand; PAM type: YTN; PAM sequence: TTG
  source 1..20: mol_type = other DNA
tttatgtatttactcaatat

SEQ ID NO: 15386 - DNA, 20 bp, synthetic construct
  misc_feature 1..20: note = Description of Artificial Sequence: Synthetic oligonucleotide
  misc_feature 1..20: note = Target: ANGPTL3; (+) strand; PAM type: YTN; PAM sequence: TTT
  source 1..20: mol_type = other DNA
atgtatttactcaatattct

SEQ ID NO: 15387 - DNA, 20 bp, synthetic construct
  misc_feature 1..20: note = Description of Artificial Sequence: Synthetic oligonucleotide
  misc_feature 1..20: note = Target: ANGPTL3; (+) strand; PAM type: YTN; PAM sequence: TTA
  source 1..20: mol_type = other DNA
tgtatttactcaatattctc

SEQ ID NO: 15388 - DNA, 20 bp, synthetic construct
  misc_feature 1..20: note = Description of Artificial Sequence: Synthetic oligonucleotide
  misc_feature 1..20: note = Target: ANGPTL3; (+) strand; PAM type: YTN; PAM sequence: TTT
  source 1..20: mol_type = other DNA
actcaatattctccttttcc

SEQ ID NO: 15389 - DNA, 20 bp, synthetic construct
  misc_feature 1..20: note = Description of Artificial Sequence: Synthetic oligonucleotide
  misc_feature 1..20: note = Target: ANGPTL3; (+) strand; PAM type: YTN; PAM sequence: TTA
  source 1..20: mol_type = other DNA
ctcaatattctccttttcct

SEQ ID NO: 15390 - DNA, 20 bp, synthetic construct
  misc_feature 1..20: note = Description of Artificial Sequence: Synthetic oligonucleotide
  misc_feature 1..20: note = Target: ANGPTL3; (+) strand; PAM type: YTN; PAM sequence: CTC
  source 1..20: mol_type = other DNA
aatattctccttttcctcta

SEQ ID NO: 15391 - DNA, 20 bp, synthetic construct
  misc_feature 1..20: note = Description of Artificial Sequence: Synthetic oligonucleotide
  misc_feature 1..20: note = Target: ANGPTL3; (+) strand; PAM type: YTN; PAM sequence: TTC
  source 1..20: mol_type = other DNA
tccttttcctctaaaataat

SEQ ID NO: 15392 - DNA, 20 bp, synthetic construct
  misc_feature 1..20: note = Description of Artificial Sequence: Synthetic oligonucleotide
  misc_feature 1..20: note = Target: ANGPTL3; (+) strand; PAM type: YTN; PAM sequence: CTC
  source 1..20: mol_type = other DNA
cttttcctctaaaataatct

SEQ ID NO: 15393 - DNA, 20 bp, synthetic construct
  misc_feature 1..20: note = Description of Artificial Sequence: Synthetic oligonucleotide
  misc_feature 1..20: note = Target: ANGPTL3; (+) strand; PAM type: YTN; PAM sequence: CTT
  source 1..20: mol_type = other DNA
ttcctctaaaataatctgaa

SEQ ID NO: 15394 - DNA, 20 bp, synthetic construct
  misc_feature 1..20: note = Description of Artificial Sequence: Synthetic oligonucleotide
  misc_feature 1..20: note = Target: ANGPTL3; (+) strand; PAM type: YTN; PAM sequence: TTT
  source 1..20: mol_type = other DNA
tcctctaaaataatctgaag

SEQ ID NO: 15395 - DNA, 20 bp, synthetic construct
  misc_feature 1..20: note = Description of Artificial Sequence: Synthetic oligonucleotide
  misc_feature 1..20: note = Target: ANGPTL3; (+) strand; PAM type: YTN; PAM sequence: TTT
  source 1..20: mol_type = other DNA
cctctaaaataatctgaagt

SEQ ID NO: 15396 - DNA, 20 bp, synthetic construct
  misc_feature 1..20: note = Description of Artificial Sequence: Synthetic oligonucleotide
  misc_feature 1..20: note = Target: ANGPTL3; (+) strand; PAM type: YTN; PAM sequence: TTC
  source 1..20: mol_type = other DNA
ctctaaaataatctgaagtg

SEQ ID NO: 15397 - DNA, 20 bp, synthetic construct
  misc_feature 1..20: note = Description of Artificial Sequence: Synthetic oligonucleotide
  misc_feature 1..20: note = Target: ANGPTL3; (+) strand; PAM type: YTN; PAM sequence: CTC
  source 1..20: mol_type = other DNA
taaaataatctgaagtgact

SEQ ID NO: 15398 - DNA, 20 bp, synthetic construct
  misc_feature 1..20: note = Description of Artificial Sequence: Synthetic oligonucleotide
  misc_feature 1..20: note = Target: ANGPTL3; (+) strand; PAM type: YTN; PAM sequence: CTA
  source 1..20: mol_type = other DNA
aaataatctgaagtgactat

SEQ ID NO: 15399 - DNA, 20 bp, synthetic construct
  misc_feature 1..20: note = Description of Artificial Sequence: Synthetic oligonucleotide
  misc_feature 1..20: note = Target: ANGPTL3; (+) strand; PAM type: YTN; PAM sequence: CTG
  source 1..20: mol_type = other DNA
aagtgactattatcaataag

SEQ ID NO: 15400 - DNA, 20 bp, synthetic construct
  misc_feature 1..20: note = Description of Artificial Sequence: Synthetic oligonucleotide
  misc_feature 1..20: note = Target: ANGPTL3; (+) strand; PAM type: YTN; PAM sequence: CTA
  source 1..20: mol_type = other DNA
ttatcaataagtttactatg

SEQ ID NO: 15401 - DNA, 20 bp, synthetic construct
  misc_feature 1..20: note = Description of Artificial Sequence: Synthetic oligonucleotide
  misc_feature 1..20: note = Target: ANGPTL3; (+) strand; PAM type: YTN; PAM sequence: TTA
  source 1..20: mol_type = other DNA
tcaataagtttactatgcca

SEQ ID NO: 15402 - DNA, 20 bp, synthetic construct
  misc_feature 1..20: note = Description of Artificial Sequence: Synthetic oligonucleotide
  misc_feature 1..20: note = Target: ANGPTL3; (+) strand; PAM type: YTN; PAM sequence: TTT
  source 1..20: mol_type = other DNA
actatgccaaaattcattaa

SEQ ID NO: 15403 - DNA, 20 bp, synthetic construct
  misc_feature 1..20: note = Description of Artificial Sequence: Synthetic oligonucleotide
  misc_feature 1..20: note = Target: ANGPTL3; (+) strand; PAM type: YTN; PAM sequence: TTA
  source 1..20: mol_type = other DNA
ctatgccaaaattcattaat

SEQ ID NO: 15404 - DNA, 20 bp, synthetic construct
  misc_feature 1..20: note = Description of Artificial Sequence: Synthetic oligonucleotide
  misc_feature 1..20: note = Target: ANGPTL3; (+) strand; PAM type: YTN; PAM sequence: CTA
  source 1..20: mol_type = other DNA
tgccaaaattcattaattgc

SEQ ID NO: 15405 - DNA, 20 bp, synthetic construct
  misc_feature 1..20: note = Description of Artificial Sequence: Synthetic oligonucleotide
  misc_feature 1..20: note = Target: ANGPTL3; (+) strand; PAM type: YTN; PAM sequence: TTC
  source 1..20: mol_type = other DNA
attaattgcctttcacttaa

SEQ ID NO: 15406 - DNA, 20 bp, synthetic construct
  misc_feature 1..20: note = Description of Artificial Sequence: Synthetic oligonucleotide
  misc_feature 1..20: note = Target: ANGPTL3; (+) strand; PAM type: YTN; PAM sequence: TTA
  source 1..20: mol_type = other DNA
attgcctttcacttaacttt

SEQ ID NO: 15407 - DNA, 20 bp, synthetic construct
  misc_feature 1..20: note = Description of Artificial Sequence: Synthetic oligonucleotide
  misc_feature 1..20: note = Target: ANGPTL3; (+) strand; PAM type: YTN; PAM sequence: TTG
  source 1..20: mol_type = other DNA
cctttcacttaacttttggg

SEQ ID NO: 15408 - DNA, 20 bp, synthetic construct
  misc_feature 1..20: note = Description of Artificial Sequence: Synthetic oligonucleotide
  misc_feature 1..20: note = Target: ANGPTL3; (+) strand; PAM type: YTN; PAM sequence: CTT
  source 1..20: mol_type = other DNA
tcacttaacttttgggacca

SEQ ID NO: 15409 - DNA, 20 bp, synthetic construct
  misc_feature 1..20: note = Description of Artificial Sequence: Synthetic oligonucleotide
  misc_feature 1..20: note = Target: ANGPTL3; (+) strand; PAM type: YTN; PAM sequence: TTT
  source 1..20: mol_type = other DNA
cacttaacttttgggaccat

SEQ ID NO: 15410 - DNA, 20 bp, synthetic construct
  misc_feature 1..20: note = Description of Artificial Sequence: Synthetic oligonucleotide
  misc_feature 1..20: note = Target: ANGPTL3; (+) strand; PAM type: YTN; PAM sequence: TTC
  source 1..20: mol_type = other DNA
acttaacttttgggaccata

SEQ ID NO: 15411 - DNA, 20 bp, synthetic construct
  misc_feature 1..20: note = Description of Artificial Sequence: Synthetic oligonucleotide
  misc_feature 1..20: note = Target: ANGPTL3; (+) strand; PAM type: YTN; PAM sequence: CTT
  source 1..20: mol_type = other DNA
aacttttgggaccataataa

SEQ ID NO: 15412 - DNA, 20 bp, synthetic construct
  misc_feature 1..20: note = Description of Artificial Sequence: Synthetic oligonucleotide
  misc_feature 1..20: note = Target: ANGPTL3; (+) strand; PAM type: YTN; PAM sequence: TTA
  source 1..20: mol_type = other DNA
acttttgggaccataataaa

SEQ ID NO: 15413 - DNA, 20 bp, synthetic construct
  misc_feature 1..20: note = Description of Artificial Sequence: Synthetic oligonucleotide
  misc_feature 1..20: note = Target: ANGPTL3; (+) strand; PAM type: YTN; PAM sequence: CTT
  source 1..20: mol_type = other DNA
ttgggaccataataaataat

SEQ ID NO: 15414 - DNA, 20 bp, synthetic construct
  misc_feature 1..20: note = Description of Artificial Sequence: Synthetic oligonucleotide
  misc_feature 1..20: note = Target: ANGPTL3; (+) strand; PAM type: YTN; PAM sequence: TTT
  source 1..20: mol_type = other DNA
tgggaccataataaataata

SEQ ID NO: 15415 - DNA, 20 bp, synthetic construct
  misc_feature 1..20: note = Description of Artificial Sequence: Synthetic oligonucleotide
  misc_feature 1..20: note = Target: ANGPTL3; (+) strand; PAM type: YTN; PAM sequence: TTT
  source 1..20: mol_type = other DNA
gggaccataataaataataa

SEQ ID NO: 15416 - DNA, 20 bp, synthetic construct
  misc_feature 1..20: note = Description of Artificial Sequence: Synthetic oligonucleotide
  misc_feature 1..20: note = Target: ANGPTL3; (+) strand; PAM type: YTN; PAM sequence: TTG
  source 1..20: mol_type = other DNA
ggaccataataaataataaa

SEQ ID NO: 15417 - DNA, 20 bp, synthetic construct
  misc_feature 1..20: note = Description of Artificial Sequence: Synthetic oligonucleotide
  misc_feature 1..20: note = Target: ANGPTL3; (+) strand; PAM type: YTN; PAM sequence: TTG
  source 1..20: mol_type = other DNA
ccataacattaataaactac

SEQ ID NO: 15418 - DNA, 20 bp, synthetic construct
  misc_feature 1..20: note = Description of Artificial Sequence: Synthetic oligonucleotide
  misc_feature 1..20: note = Target: ANGPTL3; (+) strand; PAM type: YTN; PAM sequence: TTA
  source 1..20: mol_type = other DNA
ataaactaccttacaaaacc

SEQ ID NO: 15419 - DNA, 20 bp, synthetic construct
  misc_feature 1..20: note = Description of Artificial Sequence: Synthetic oligonucleotide
  misc_feature 1..20: note = Target: ANGPTL3; (+) strand; PAM type: YTN; PAM sequence: CTA
  source 1..20: mol_type = other DNA
ccttacaaaaccaccaatta

SEQ ID NO: 15420 - DNA, 20 bp, synthetic construct
  misc_feature 1..20: note = Description of Artificial Sequence: Synthetic oligonucleotide
  misc_feature 1..20: note = Target: ANGPTL3; (+) strand; PAM type: YTN; PAM sequence: CTT
  source 1..20: mol_type = other DNA
acaaaaccaccaattaaaat

SEQ ID NO: 15421 - DNA, 20 bp, synthetic construct
  misc_feature 1..20: note = Description of Artificial Sequence: Synthetic oligonucleotide
  misc_feature 1..20: note = Target: ANGPTL3; (+) strand; PAM type: YTN; PAM sequence: TTA
  source 1..20: mol_type = other DNA
caaaaccaccaattaaaatc

SEQ ID NO: 15422 - DNA, 20 bp, synthetic construct
  misc_feature 1..20: note = Description of Artificial Sequence: Synthetic oligonucleotide
  misc_feature 1..20: note = Target: ANGPTL3; (+) strand; PAM type: YTN; PAM sequence: TTA
  source 1..20: mol_type = other DNA
aaatcaaacaaacaaaaaag

SEQ ID NO: 15423 - DNA, 20 bp, synthetic construct
  misc_feature 1..20: note = Description of Artificial Sequence: Synthetic oligonucleotide
  misc_feature 1..20: note = Target: ANGPTL3; (+) strand; PAM type: YTN; PAM sequence: TTA
  source 1..20: mol_type = other DNA
tttacatctgtcaacataaa

SEQ ID NO: 15424 - DNA, 20 bp, synthetic construct
  misc_feature 1..20: note = Description of Artificial Sequence: Synthetic oligonucleotide
  misc_feature 1..20: note = Target: ANGPTL3; (+) strand; PAM type: YTN; PAM sequence: TTT
  source 1..20: mol_type = other DNA
acatctgtcaacataaatct

SEQ ID NO: 15425 - DNA, 20 bp, synthetic construct
  misc_feature 1..20: note = Description of Artificial Sequence: Synthetic oligonucleotide
  misc_feature 1..20: note = Target: ANGPTL3; (+) strand; PAM type: YTN; PAM sequence: TTA
  source 1..20: mol_type = other DNA
catctgtcaacataaatcta

SEQ ID NO: 15426 - DNA, 20 bp, synthetic construct
  misc_feature 1..20: note = Description of Artificial Sequence: Synthetic oligonucleotide
  misc_feature 1..20: note = Target: ANGPTL3; (+) strand; PAM type: YTN; PAM sequence: CTG
  source 1..20: mol_type = other DNA
tcaacataaatctactaaaa

SEQ ID NO: 15427 - DNA, 20 bp, synthetic construct
  misc_feature 1..20: note = Description of Artificial Sequence: Synthetic oligonucleotide
  misc_feature 1..20: note = Target: ANGPTL3; (+) strand; PAM type: YTN; PAM sequence: CTA
  source 1..20: mol_type = other DNA
ctaaaaatacatgatttcat

SEQ ID NO: 15428 - DNA, 20 bp, synthetic construct
  misc_feature 1..20: note = Description of Artificial Sequence: Synthetic oligonucleotide
  misc_feature 1..20: note = Target: ANGPTL3; (+) strand; PAM type: YTN; PAM sequence: CTA
  source 1..20: mol_type = other DNA
aaaatacatgatttcattca

SEQ ID NO: 15429 - DNA, 20 bp, synthetic construct
  misc_feature 1..20: note = Description of Artificial Sequence: Synthetic oligonucleotide
  misc_feature 1..20: note = Target: ANGPTL3; (+) strand; PAM type: YTN; PAM sequence: TTT
  source 1..20: mol_type = other DNA
cattcattatattcaggtag

SEQ ID NO: 15430 - DNA, 20 bp, synthetic construct
  misc_feature 1..20: note = Description of Artificial Sequence: Synthetic oligonucleotide
  misc_feature 1..20: note = Target: ANGPTL3; (+) strand; PAM type: YTN; PAM sequence: TTC
  source 1..20: mol_type = other DNA
attcattatattcaggtagt

SEQ ID NO: 15431 - DNA, 20 bp, synthetic construct
  misc_feature 1..20: note = Description of Artificial Sequence: Synthetic oligonucleotide
  misc_feature 1..20: note = Target: ANGPTL3; (+) strand; PAM type: YTN; PAM sequence: TTC
  source 1..20: mol_type = other DNA
attatattcaggtagtccat

SEQ ID NO: 15432 - DNA, 20 bp, synthetic construct
  misc_feature 1..20: note = Description of Artificial Sequence: Synthetic oligonucleotide
  misc_feature 1..20: note = Target: ANGPTL3; (+) strand; PAM type: YTN; PAM sequence: TTA
  source 1..20: mol_type = other DNA
tattcaggtagtccatggac

SEQ ID NO: 15433 - DNA, 20 bp, synthetic construct
  misc_feature 1..20: note = Description of Artificial Sequence: Synthetic oligonucleotide
  misc_feature 1..20: note = Target: ANGPTL3; (+) strand; PAM type: YTN; PAM sequence: TTC
  source 1..20: mol_type = other DNA
aggtagtccatggacattaa

SEQ ID NO: 15434 - DNA, 20 bp, synthetic construct
  misc_feature 1..20: note = Description of Artificial Sequence: Synthetic oligonucleotide
  misc_feature 1..20: note = Target: ANGPTL3; (+) strand; PAM type: YTN; PAM sequence: TTA
  source 1..20: mol_type = other DNA
attcaacatcgaatagatgg

SEQ ID NO: 15435 - DNA, 20 bp, synthetic construct
  misc_feature 1..20: note = Description of Artificial Sequence: Synthetic oligonucleotide
  misc_feature 1..20: note = Target: ANGPTL3; (+) strand; PAM type: YTN; PAM sequence: TTC
  source 1..20: mol_type = other DNA
aacatcgaatagatggatca

SEQ ID NO: 15436 - DNA, 20 bp, synthetic construct
  misc_feature 1..20: note = Description of Artificial Sequence: Synthetic oligonucleotide
  misc_feature 1..20: note = Target: ANGPTL3; (+) strand; PAM type: YTN; PAM sequence: CTT
  source 1..20: mol_type = other DNA
caatgaaacgtgggagaact

SEQ ID NO: 15437 - DNA, 20 bp, synthetic construct
  misc_feature 1..20: note = Description of Artificial Sequence: Synthetic oligonucleotide
  misc_feature 1..20: note = Target: ANGPTL3; (+) strand; PAM type: YTN; PAM sequence: TTC
  source 1..20: mol_type = other DNA
aatgaaacgtgggagaacta

SEQ ID NO: 15438 - DNA, 20 bp, synthetic construct
  misc_feature 1..20: note = Description of Artificial Sequence: Synthetic oligonucleotide
  misc_feature 1..20: note = Target: ANGPTL3; (+) strand; PAM type: YTN; PAM sequence: CTA
  source 1..20: mol_type = other DNA
caaatatggttttgggaggc

SEQ ID NO: 15439 - DNA, 20 bp, synthetic construct
  misc_feature 1..20: note = Description of Artificial Sequence: Synthetic oligonucleotide
  misc_feature 1..20: note = Target: ANGPTL3; (+) strand; PAM type: YTN; PAM sequence: TTT
  source 1..20: mol_type = other DNA
tgggaggcttgatggtaagg

SEQ ID NO: 15440 - DNA, 20 bp, synthetic construct
  misc_feature 1..20: note = Description of Artificial Sequence: Synthetic oligonucleotide
  misc_feature 1..20: note = Target: ANGPTL3; (+) strand; PAM type: YTN; PAM sequence: TTT
  source 1..20: mol_type = other DNA
gggaggcttgatggtaaggg

SEQ ID NO: 15441 - DNA, 20 bp, synthetic construct
  misc_feature 1..20: note = Description of Artificial Sequence: Synthetic oligonucleotide
  misc_feature 1..20: note = Target: ANGPTL3; (+) strand; PAM type: YTN; PAM sequence: TTG
  source 1..20: mol_type = other DNA
ggaggcttgatggtaagggg

SEQ ID NO: 15442 - DNA, 20 bp, synthetic construct
  misc_feature 1..20: note = Description of Artificial Sequence: Synthetic oligonucleotide
  misc_feature 1..20: note = Target: ANGPTL3; (+) strand; PAM type: YTN; PAM sequence: CTT
  source 1..20: mol_type = other DNA
gatggtaaggggactacatt

SEQ ID NO: 15443 - DNA, 20 bp, synthetic construct
  misc_feature 1..20: note = Description of Artificial Sequence: Synthetic oligonucleotide
  misc_feature 1..20: note = Target: ANGPTL3; (+) strand; PAM type: YTN; PAM sequence: TTG
  source 1..20: mol_type = other DNA
atggtaaggggactacattc

SEQ ID NO: 15444 - DNA, 20 bp, synthetic construct
  misc_feature 1..20: note = Description of Artificial Sequence: Synthetic oligonucleotide
  misc_feature 1..20: note = Target: ANGPTL3; (+) strand; PAM type: YTN; PAM sequence: CTA
  source 1..20: mol_type = other DNA
cattcaatcattcattcact

SEQ ID NO: 15445 - DNA, 20 bp, synthetic construct
  misc_feature 1..20: note = Description of Artificial Sequence: Synthetic oligonucleotide
  misc_feature 1..20: note = Target: ANGPTL3; (+) strand; PAM type: YTN; PAM sequence: TTC
  source 1..20: mol_type = other DNA
aatcattcattcacttgcta

SEQ ID NO: 15446 - DNA, 20 bp, synthetic construct
  misc_feature 1..20: note = Description of Artificial Sequence: Synthetic oligonucleotide
  misc_feature 1..20: note = Target: ANGPTL3; (+) strand; PAM type: YTN; PAM sequence: TTC
  source 1..20: mol_type = other DNA
attcacttgctaatctacaa

SEQ ID NO: 15447 - DNA, 20 bp, synthetic construct
  misc_feature 1..20: note = Description of Artificial Sequence: Synthetic oligonucleotide
  misc_feature 1..20: note = Target: ANGPTL3; (+) strand; PAM type: YTN; PAM sequence: TTC
  source 1..20: mol_type = other DNA
acttgctaatctacaaatat

SEQ ID NO: 15448 - DNA, 20 bp, synthetic construct
  misc_feature 1..20: note = Description of Artificial Sequence: Synthetic oligonucleotide
  misc_feature 1..20: note = Target: ANGPTL3; (+) strand; PAM type: YTN; PAM sequence: CTT
  source 1..20: mol_type = other DNA
gctaatctacaaatatttac

SEQ ID NO: 15449 - DNA, 20 bp, synthetic construct
  misc_feature 1..20: note = Description of Artificial Sequence: Synthetic oligonucleotide
  misc_feature 1..20: note = Target: ANGPTL3; (+) strand; PAM type: YTN; PAM sequence: TTG
  source 1..20: mol_type = other DNA
ctaatctacaaatatttact

SEQ ID NO: 15450 - DNA, 20 bp, synthetic construct
  misc_feature 1..20: note = Description of Artificial Sequence: Synthetic oligonucleotide
  misc_feature 1..20: note = Target: ANGPTL3; (+) strand; PAM type: YTN; PAM sequence: CTA
  source 1..20: mol_type = other DNA
atctacaaatatttactgag

SEQ ID NO: 15451 - DNA, 20 bp, synthetic construct
  misc_feature 1..20: note = Description of Artificial Sequence: Synthetic oligonucleotide
  misc_feature 1..20: note = Target: ANGPTL3; (+) strand; PAM type: YTN; PAM sequence: CTA
  source 1..20: mol_type = other DNA
caaatatttactgagaacct

SEQ ID NO: 15452 - DNA, 20 bp, synthetic construct
  misc_feature 1..20: note = Description of Artificial Sequence: Synthetic oligonucleotide
  misc_feature 1..20: note = Target: ANGPTL3; (+) strand; PAM type: YTN; PAM sequence: TTT
  source 1..20: mol_type = other DNA
actgagaacctcttatggac

SEQ ID NO: 15453 - DNA, 20 bp, synthetic construct
  misc_feature 1..20: note = Description of Artificial Sequence: Synthetic oligonucleotide
  misc_feature 1..20: note = Target: ANGPTL3; (+) strand; PAM type: YTN; PAM sequence: TTA
  source 1..20: mol_type = other DNA
ctgagaacctcttatggacc

SEQ ID NO: 15454 - DNA, 20 bp, synthetic construct
  misc_feature 1..20: note = Description of Artificial Sequence: Synthetic oligonucleotide
  misc_feature 1..20: note = Target: ANGPTL3; (+) strand; PAM type: YTN; PAM sequence: CTG
  source 1..20: mol_type = other DNA
agaacctcttatggaccagg

SEQ ID NO: 15455 - DNA, 20 bp, synthetic construct
  misc_feature 1..20: note = Description of Artificial Sequence: Synthetic oligonucleotide
  misc_feature 1..20: note = Target: ANGPTL3; (+) strand; PAM type: YTN; PAM sequence: CTC
  source 1..20: mol_type = other DNA
ttatggaccaggtattagga

SEQ ID NO: 15456 - DNA, 20 bp, synthetic construct
  misc_feature 1..20: note = Description of Artificial Sequence: Synthetic oligonucleotide
  misc_feature 1..20: note = Target: ANGPTL3; (+) strand; PAM type: YTN; PAM sequence: CTT
  source 1..20: mol_type = other DNA
atggaccaggtattaggaaa

SEQ ID NO: 15457 - DNA, 20 bp, synthetic construct
  misc_feature 1..20: note = Description of Artificial Sequence: Synthetic oligonucleotide
  misc_feature 1..20: note = Target: ANGPTL3; (+) strand; PAM type: YTN; PAM sequence: TTA
  source 1..20: mol_type = other DNA
tggaccaggtattaggaaaa

SEQ ID NO: 15458 - DNA, 20 bp, synthetic construct
  misc_feature 1..20: note = Description of Artificial Sequence: Synthetic oligonucleotide
  misc_feature 1..20: note = Target: ANGPTL3; (+) strand; PAM type: YTN; PAM sequence: TTA
  source 1..20: mol_type = other DNA
ggaaaagtagtaacgaacga

SEQ ID NO: 15459 - DNA, 20 bp, synthetic construct
  misc_feature 1..20: note = Description of Artificial Sequence: Synthetic oligonucleotide
  misc_feature 1..20: note = Target: ANGPTL3; (+) strand; PAM type: YTN; PAM sequence: CTC
  source 1..20: mol_type = other DNA
agccttcatataatttatta

SEQ ID NO: 15460 - DNA, 20 bp, synthetic construct
  misc_feature 1..20: note = Description of Artificial Sequence: Synthetic oligonucleotide
  misc_feature 1..20: note = Target: ANGPTL3; (+) strand; PAM type: YTN; PAM sequence: CTT
  source 1..20: mol_type = other DNA
catataatttattatcaaac

SEQ ID NO: 15461 - DNA, 20 bp, synthetic construct
  misc_feature 1..20: note = Description of Artificial Sequence: Synthetic oligonucleotide
  misc_feature 1..20: note = Target: ANGPTL3; (+) strand; PAM type: YTN; PAM sequence: TTC
  source 1..20: mol_type = other DNA
atataatttattatcaaaca

SEQ ID NO: 15462 - DNA, 20 bp, synthetic construct
  misc_feature 1..20: note = Description of Artificial Sequence: Synthetic oligonucleotide
  misc_feature 1..20: note = Target: ANGPTL3; (+) strand; PAM type: YTN; PAM sequence: TTT
  source 1..20: mol_type = other DNA
attatcaaacaattacacat

SEQ ID NO: 15463 - DNA, 20 bp, synthetic construct
  misc_feature 1..20: note = Description of Artificial Sequence: Synthetic oligonucleotide
  misc_feature 1..20: note = Target: ANGPTL3; (+) strand; PAM type: YTN; PAM sequence: TTA
  source 1..20: mol_type = other DNA
ttatcaaacaattacacatt

SEQ ID NO: 15464 - DNA, 20 bp, synthetic construct
  misc_feature 1..20: note = Description of Artificial Sequence: Synthetic oligonucleotide
  misc_feature 1..20: note = Target: ANGPTL3; (+) strand; PAM type: YTN; PAM sequence: TTA
  source 1..20: mol_type = other DNA
tcaaacaattacacatttgt

SEQ ID NO: 15465 - DNA, 20 bp, synthetic construct
  misc_feature 1..20: note = Description of Artificial Sequence: Synthetic oligonucleotide
  misc_feature 1..20: note = Target: ANGPTL3; (+) strand; PAM type: YTN; PAM sequence: TTA
  source 1..20: mol_type = other DNA
cacatttgttagtaaattac

SEQ ID NO: 15466 - DNA, 20 bp, synthetic construct
  misc_feature 1..20: note = Description of Artificial Sequence: Synthetic oligonucleotide
  misc_feature 1..20: note = Target: ANGPTL3; (+) strand; PAM type: YTN; PAM sequence: TTT
  source 1..20: mol_type = other DNA
gttagtaaattacacttatt

SEQ ID NO: 15467 - DNA, 20 bp, synthetic construct
  misc_feature 1..20: note = Description of Artificial Sequence: Synthetic oligonucleotide
  misc_feature 1..20: note = Target: ANGPTL3; (+) strand; PAM type: YTN; PAM sequence: TTG
  source 1..20: mol_type = other DNA
ttagtaaattacacttatta

SEQ ID NO: 15468 - DNA, 20 bp, synthetic construct
  misc_feature 1..20: note = Description of Artificial Sequence: Synthetic oligonucleotide
  misc_feature 1..20: note = Target: ANGPTL3; (+) strand; PAM type: YTN; PAM sequence: TTA
  source 1..20: mol_type = other DNA
gtaaattacacttattacaa

SEQ ID NO: 15469 - DNA, 20 bp, synthetic construct
  misc_feature 1..20: note = Description of Artificial Sequence: Synthetic oligonucleotide
  misc_feature 1..20: note = Target: ANGPTL3; (+) strand; PAM type: YTN; PAM sequence: TTA
  source 1..20: mol_type = other DNA
cacttattacaactgttatt

SEQ ID NO: 15470 - DNA, 20 bp, synthetic construct
  misc_feature 1..20: note = Description of Artificial Sequence: Synthetic oligonucleotide
  misc_feature 1..20: note = Target: ANGPTL3; (+) strand; PAM type: YTN; PAM sequence: CTT
  source 1..20: mol_type = other DNA
attacaactgttattatttg

SEQ ID NO: 15471 - DNA, 20 bp, synthetic construct
  misc_feature 1..20: note = Description of Artificial Sequence: Synthetic oligonucleotide
  misc_feature 1..20: note = Target: ANGPTL3; (+) strand; PAM type: YTN; PAM sequence: TTA
  source 1..20: mol_type = other DNA
ttacaactgttattatttga

SEQ ID NO: 15472 - DNA, 20 bp, synthetic construct
  misc_feature 1..20: note = Description of Artificial Sequence: Synthetic oligonucleotide
  misc_feature 1..20: note = Target: ANGPTL3; (+) strand; PAM type: YTN; PAM sequence: TTA
  source 1..20: mol_type = other DNA
caactgttattatttgaatt

SEQ ID NO: 15473 - DNA, 20 bp, synthetic construct
  misc_feature 1..20: note = Description of Artificial Sequence: Synthetic oligonucleotide
  misc_feature 1..20: note = Target: ANGPTL3; (+) strand; PAM type: YTN; PAM sequence: CTG
  source 1..20: mol_type = other DNA
ttattatttgaattatattt

SEQ ID NO: 15474 - DNA, 20 bp, synthetic construct
  misc_feature 1..20: note = Description of Artificial Sequence: Synthetic oligonucleotide
  misc_feature 1..20: note = Target: ANGPTL3; (+) strand; PAM type: YTN; PAM sequence: TTA
  source 1..20: mol_type = other DNA
ttatttgaattatatttatc

SEQ ID NO: 15475 - DNA, 20 bp, synthetic construct
  misc_feature 1..20: note = Description of Artificial Sequence: Synthetic oligonucleotide
  misc_feature 1..20: note = Target: ANGPTL3; (+) strand; PAM type: YTN; PAM sequence: TTA
  source 1..20: mol_type = other DNA
tttgaattatatttatcaca

SEQ ID NO: 15476 - DNA, 20 bp, synthetic construct
  misc_feature 1..20: note = Description of Artificial Sequence: Synthetic oligonucleotide
  misc_feature 1..20: note = Target: ANGPTL3; (+) strand; PAM type: YTN; PAM sequence: TTT
  source 1..20: mol_type = other DNA
gaattatatttatcacaatt

SEQ ID NO: 15477 - DNA, 20 bp, synthetic construct
  misc_feature 1..20: note = Description of Artificial Sequence: Synthetic oligonucleotide
  misc_feature 1..20: note = Target: ANGPTL3; (+) strand; PAM type: YTN; PAM sequence: TTG
  source 1..20: mol_type = other DNA
aattatatttatcacaatta

SEQ ID NO: 15478 - DNA, 20 bp, synthetic construct
  misc_feature 1..20: note = Description of Artificial Sequence: Synthetic oligonucleotide
  misc_feature 1..20: note = Target: ANGPTL3; (+) strand; PAM type: YTN; PAM sequence: TTA
  source 1..20: mol_type = other DNA
tatttatcacaattacatgt

SEQ ID NO: 15479 - DNA, 20 bp, synthetic construct
  misc_feature 1..20: note = Description of Artificial Sequence: Synthetic oligonucleotide
  misc_feature 1..20: note = Target: ANGPTL3; (+) strand; PAM type: YTN; PAM sequence: TTT
  source 1..20: mol_type = other DNA
atcacaattacatgtctgtt

SEQ ID NO: 15480 - DNA, 20 bp, synthetic construct
  misc_feature 1..20: note = Description of Artificial Sequence: Synthetic oligonucleotide
  misc_feature 1..20: note = Target: ANGPTL3; (+) strand; PAM type: YTN; PAM sequence: TTA
  source 1..20: mol_type = other DNA
tcacaattacatgtctgttc

SEQ ID NO: 15481 - DNA, 20 bp, synthetic construct
  misc_feature 1..20: note = Description of Artificial Sequence: Synthetic oligonucleotide
  misc_feature 1..20: note = Target: ANGPTL3; (+) strand; PAM type: YTN; PAM sequence: TTA
  source 1..20: mol_type = other DNA
catgtctgttcttaaatata

SEQ ID NO: 15482 - DNA, 20 bp, synthetic construct
  misc_feature 1..20: note = Description of Artificial Sequence: Synthetic oligonucleotide
  misc_feature 1..20: note = Target: ANGPTL3; (+) strand; PAM type: YTN; PAM sequence: CTG
  source 1..20: mol_type = other DNA
ttcttaaatatacttatcac

SEQ ID NO: 15483 - DNA, 20 bp, synthetic construct
  misc_feature 1..20: note = Description of Artificial Sequence: Synthetic oligonucleotide
  misc_feature 1..20: note = Target: ANGPTL3; (+) strand; PAM type: YTN; PAM sequence: TTC
  source 1..20: mol_type = other DNA
ttaaatatacttatcacaat

SEQ ID NO: 15484 - DNA, 20 bp, synthetic construct
  misc_feature 1..20: note = Description of Artificial Sequence: Synthetic oligonucleotide
  misc_feature 1..20: note = Target: ANGPTL3; (+) strand; PAM type: YTN; PAM sequence: CTT
  source 1..20: mol_type = other DNA
aaatatacttatcacaattt

SEQ ID NO: 15485 - DNA, 20 bp, synthetic construct
  misc_feature 1..20: note = Description of Artificial Sequence: Synthetic oligonucleotide
  misc_feature 1..20: note = Target: ANGPTL3; (+) strand; PAM type: YTN; PAM sequence: TTA
  source 1..20: mol_type = other DNA
aatatacttatcacaattta

SEQ ID NO: 15486 - DNA, 20 bp, synthetic construct
  misc_feature 1..20: note = Description of Artificial Sequence: Synthetic oligonucleotide
  misc_feature 1..20: note = Target: ANGPTL3; (+) strand; PAM type: YTN; PAM sequence: CTT
  source 1..20: mol_type = other DNA
atcacaatttaattccacgg

SEQ ID NO: 15487 - DNA, 20 bp, synthetic construct
  misc_feature 1..20: note = Description of Artificial Sequence: Synthetic oligonucleotide
  misc_feature 1..20: note = Target: ANGPTL3; (+) strand; PAM type: YTN; PAM sequence: TTA
  source 1..20: mol_type = other DNA
tcacaatttaattccacggc

SEQ ID NO: 15488 - DNA, 20 bp, synthetic construct
  misc_feature 1..20: note = Description of Artificial Sequence: Synthetic oligonucleotide
  misc_feature 1..20: note = Target: ANGPTL3; (+) strand; PAM type: YTN; PAM sequence: TTT
  source 1..20: mol_type = other DNA
aattccacggcttacaatga

SEQ ID NO: 15489 - DNA, 20 bp, synthetic construct
  misc_feature 1..20: note = Description of Artificial Sequence: Synthetic oligonucleotide
  misc_feature 1..20: note = Target: ANGPTL3; (+) strand; PAM type: YTN; PAM sequence: TTA
  source 1..20: mol_type = other DNA
attccacggcttacaatgat

SEQ ID NO: 15490 - DNA, 20 bp, synthetic construct
  misc_feature 1..20: note = Description of Artificial Sequence: Synthetic oligonucleotide
  misc_feature 1..20: note = Target: ANGPTL3; (+) strand; PAM type: YTN; PAM sequence: TTC
  source 1..20: mol_type = other DNA
cacggcttacaatgatcata

SEQ ID NO: 15491 - DNA, 20 bp, synthetic construct
  misc_feature 1..20: note = Description of Artificial Sequence: Synthetic oligonucleotide
  misc_feature 1..20: note = Target: ANGPTL3; (+) strand; PAM type: YTN; PAM sequence: CTT
  source 1..20: mol_type = other DNA
acaatgatcataactataat

SEQ ID NO: 15492 - DNA, 20 bp, synthetic construct
  misc_feature 1..20: note = Description of Artificial Sequence: Synthetic oligonucleotide
  misc_feature 1..20: note = Target: ANGPTL3; (+) strand; PAM type: YTN; PAM sequence: TTA
  source 1..20: mol_type = other DNA
caatgatcataactataatt

SEQ ID NO: 15493 - DNA, 20 bp, synthetic construct
  misc_feature 1..20: note = Description of Artificial Sequence: Synthetic oligonucleotide
  misc_feature 1..20: note = Target: ANGPTL3; (+) strand; PAM type: YTN; PAM sequence: CTA
  source 1..20: mol_type = other DNA
taattattaaagacaatttt

SEQ ID NO: 15494 - DNA, 20 bp, synthetic construct
  misc_feature 1..20: note = Description of Artificial Sequence: Synthetic oligonucleotide
  misc_feature 1..20: note = Target: ANGPTL3; (+) strand; PAM type: YTN; PAM sequence: TTA
  source 1..20: mol_type = other DNA
ttaaagacaattttgattaa

SEQ ID NO: 15495 - DNA, 20 bp, synthetic construct
  misc_feature 1..20: note = Description of Artificial Sequence: Synthetic oligonucleotide
  misc_feature 1..20: note = Target: ANGPTL3; (+) strand; PAM type: YTN; PAM sequence: TTA
  source 1..20: mol_type = other DNA
aagacaattttgattaaatg

SEQ ID NO: 15496 - DNA, 20 bp, synthetic construct
  misc_feature 1..20: note = Description of Artificial Sequence: Synthetic oligonucleotide
  misc_feature 1..20: note = Target: ANGPTL3; (+) strand; PAM type: YTN; PAM sequence: TTT
  source 1..20: mol_type = other DNA
tgattaaatgttatgtcata

SEQ ID NO: 15497 - DNA, 20 bp, synthetic construct
  misc_feature 1..20: note = Description of Artificial Sequence: Synthetic oligonucleotide
  misc_feature 1..20: note = Target: ANGPTL3; (+) strand; PAM type: YTN; PAM sequence: TTT
  source 1..20: mol_type = other DNA
gattaaatgttatgtcataa

SEQ ID NO: 15498 - DNA, 20 bp, synthetic construct
  misc_feature 1..20: note = Description of Artificial Sequence: Synthetic oligonucleotide
  misc_feature 1..20: note = Target: ANGPTL3; (+) strand; PAM type: YTN; PAM sequence: TTG
  source 1..20: mol_type = other DNA
attaaatgttatgtcataag

SEQ ID NO: 15499 - DNA, 20 bp, synthetic construct
  misc_feature 1..20: note = Description of Artificial Sequence: Synthetic oligonucleotide
  misc_feature 1..20: note = Target: ANGPTL3; (+) strand; PAM type: YTN; PAM sequence: TTA
  source 1..20: mol_type = other DNA
aatgttatgtcataagtagt

SEQ ID NO: 15500 - DNA, 20 bp, synthetic construct
  misc_feature 1..20: note = Description of Artificial Sequence: Synthetic oligonucleotide
  misc_feature 1..20: note = Target: ANGPTL3; (+) strand; PAM type: YTN; PAM sequence: TTA
  source 1..20: mol_type = other DNA
tgtcataagtagtaactgtt

SEQ ID NO: 15501 - DNA, 20 bp, synthetic construct
  misc_feature 1..20: note = Description of Artificial Sequence: Synthetic oligonucleotide
  misc_feature 1..20: note = Target: ANGPTL3; (+) strand; PAM type: YTN; PAM sequence: CTG
  source 1..20: mol_type = other DNA
ttacaaataagctgtgaaaa

SEQ ID NO: 15502 - DNA, 20 bp, synthetic construct
  misc_feature 1..20: note = Description of Artificial Sequence: Synthetic oligonucleotide
  misc_feature 1..20: note = Target: ANGPTL3; (+) strand; PAM type: YTN; PAM sequence: TTA
  source 1..20: mol_type = other DNA
caaataagctgtgaaaagaa

SEQ ID NO: 15503 - DNA, 20 bp, synthetic construct
  misc_feature 1..20: note = Description of Artificial Sequence: Synthetic oligonucleotide
  misc_feature 1..20: note = Target: ANGPTL3; (+) strand; PAM type: YTN; PAM sequence: CTG
  source 1..20: mol_type = other DNA
tgaaaagaaccactcctagc

SEQ ID NO: 15504 - DNA, 20 bp, synthetic construct
  misc_feature 1..20: note = Description of Artificial Sequence: Synthetic oligonucleotide
  misc_feature 1..20: note = Target: ANGPTL3; (+) strand; PAM type: YTN; PAM sequence: CTC
  source 1..20: mol_type = other DNA
ctagcattagtcactctatt

SEQ ID NO: 15505 - DNA, 20 bp, synthetic construct
  misc_feature 1..20: note = Description of Artificial Sequence: Synthetic oligonucleotide
  misc_feature 1..20: note = Target: ANGPTL3; (+) strand; PAM type: YTN; PAM sequence: CTA
  source 1..20: mol_type = other DNA
gcattagtcactctattctc

SEQ ID NO: 15506 - DNA, 20 bp, synthetic construct
  misc_feature 1..20: note = Description of Artificial Sequence: Synthetic oligonucleotide
  misc_feature 1..20: note = Target: ANGPTL3; (+) strand; PAM type: YTN; PAM sequence: TTA
  source 1..20: mol_type = other DNA
gtcactctattctctcatta

SEQ ID NO: 15507 - DNA, 20 bp, synthetic construct
  misc_feature 1..20: note = Description of Artificial Sequence: Synthetic oligonucleotide
  misc_feature 1..20: note = Target: ANGPTL3; (+) strand; PAM type: YTN; PAM sequence: CTC
  source 1..20: mol_type = other DNA
tattctctcattaacgtttt

SEQ ID NO: 15508 - DNA, 20 bp, synthetic construct
  misc_feature 1..20: note = Description of Artificial Sequence: Synthetic oligonucleotide
  misc_feature 1..20: note = Target: ANGPTL3; (+) strand; PAM type: YTN; PAM sequence: CTA
  source 1..20: mol_type = other DNA
ttctctcattaacgttttac

SEQ ID NO: 15509 - DNA, 20 bp, synthetic construct
  misc_feature 1..20: note = Description of Artificial Sequence: Synthetic oligonucleotide
  misc_feature 1..20: note = Target: ANGPTL3; (+) strand; PAM type: YTN; PAM sequence: TTC
  source 1..20: mol_type = other DNA
tctcattaacgttttacata

SEQ ID NO: 15510 - DNA, 20 bp, synthetic construct
  misc_feature 1..20: note = Description of Artificial Sequence: Synthetic oligonucleotide
  misc_feature 1..20: note = Target: ANGPTL3; (+) strand; PAM type: YTN; PAM sequence: CTC
  source 1..20: mol_type = other DNA
tcattaacgttttacatatc

SEQ ID NO: 15511 - DNA, 20 bp, synthetic construct
  misc_feature 1..20: note = Description of Artificial Sequence: Synthetic oligonucleotide
  misc_feature 1..20: note = Target: ANGPTL3; (+) strand; PAM type: YTN; PAM sequence: CTC
  source 1..20: mol_type = other DNA
attaacgttttacatatcaa

SEQ ID NO: 15512 - DNA, 20 bp, synthetic construct
  misc_feature 1..20: note = Description of Artificial Sequence: Synthetic oligonucleotide
  misc_feature 1..20: note = Target: ANGPTL3; (+) strand; PAM type: YTN; PAM sequence: TTA
  source 1..20: mol_type = other DNA
acgttttacatatcaattaa

SEQ ID NO: 15513 - DNA, 20 bp, synthetic construct
  misc_feature 1..20: note = Description of Artificial Sequence: Synthetic oligonucleotide
  misc_feature 1..20: note = Target: ANGPTL3; (+) strand; PAM type: YTN; PAM sequence: TTT
  source 1..20: mol_type = other DNA
tacatatcaattaattggaa

SEQ ID NO: 15514 - DNA, 20 bp, synthetic construct
  misc_feature 1..20: note = Description of Artificial Sequence: Synthetic oligonucleotide
  misc_feature 1..20: note = Target: ANGPTL3; (+) strand; PAM type: YTN; PAM sequence: TTT
  source 1..20: mol_type = other DNA
acatatcaattaattggaag

SEQ ID NO: 15515 - DNA, 20 bp, synthetic construct
  misc_feature 1..20: note = Description of Artificial Sequence: Synthetic oligonucleotide
  misc_feature 1..20: note = Target: ANGPTL3; (+) strand; PAM type: YTN; PAM sequence: TTA
  source 1..20: mol_type = other DNA
catatcaattaattggaagt

SEQ ID NO: 15516 - DNA, 20 bp, synthetic construct
  misc_feature 1..20: note = Description of Artificial Sequence: Synthetic oligonucleotide
  misc_feature 1..20: note = Target: ANGPTL3; (+) strand; PAM type: YTN; PAM sequence: TTA
  source 1..20: mol_type = other DNA
attggaagttaaaaggacca

SEQ ID NO: 15517 - DNA, 20 bp, synthetic construct
  misc_feature 1..20: note = Description of Artificial Sequence: Synthetic oligonucleotide
  misc_feature 1..20: note = Target: ANGPTL3; (+) strand; PAM type: YTN; PAM sequence: TTG
  source 1..20: mol_type = other DNA
gaagttaaaaggaccaggaa

SEQ ID NO: 15518 - DNA, 20 bp, synthetic construct
  misc_feature 1..20: note = Description of Artificial Sequence: Synthetic oligonucleotide
  misc_feature 1..20: note = Target: ANGPTL3; (+) strand; PAM type: YTN; PAM sequence: TTA
  source 1..20: mol_type = other DNA
aaaggaccaggaaactcaga

SEQ ID NO: 15519 - DNA, 20 bp, synthetic construct
  misc_feature 1..20: note = Description of Artificial Sequence: Synthetic oligonucleotide
  misc_feature 1..20: note = Target: ANGPTL3; (+) strand; PAM type: YTN; PAM sequence: CTC
  source 1..20: mol_type = other DNA
agacatacagtatacatttt

SEQ ID NO: 15520 - DNA, 20 bp, synthetic construct
  misc_feature 1..20: note = Description of Artificial Sequence: Synthetic oligonucleotide
  misc_feature 1..20: note = Target: ANGPTL3; (+) strand; PAM type: YTN; PAM sequence: TTT
  source 1..20: mol_type = other DNA
taaaatttcaattatttaaa

SEQ ID NO: 15521 - DNA, 20 bp, synthetic construct
  misc_feature 1..20: note = Description of Artificial Sequence: Synthetic oligonucleotide
  misc_feature 1..20: note = Target: ANGPTL3; (+) strand; PAM type: YTN; PAM sequence: TTT
  source 1..20: mol_type = other DNA
aaaatttcaattatttaaat

SEQ ID NO: 15522 - DNA, 20 bp, synthetic construct
  misc_feature 1..20: note = Description of Artificial Sequence: Synthetic oligonucleotide
  misc_feature 1..20: note = Target: ANGPTL3; (+) strand; PAM type: YTN; PAM sequence: TTA
  source 1..20: mol_type = other DNA
aaatttcaattatttaaata

SEQ ID NO: 15523 - DNA, 20 bp, synthetic construct
  misc_feature 1..20: note = Description of Artificial Sequence: Synthetic oligonucleotide
  misc_feature 1..20: note = Target: ANGPTL3; (+) strand; PAM type: YTN; PAM sequence: TTT
  source 1..20: mol_type = other DNA
caattatttaaatataatat

SEQ ID NO: 15524 - DNA, 20 bp, synthetic construct
  misc_feature 1..20: note = Description of Artificial Sequence: Synthetic oligonucleotide
  misc_feature 1..20: note = Target: ANGPTL3; (+) strand; PAM type: YTN; PAM sequence: TTC
  source 1..20: mol_type = other DNA
aattatttaaatataatata

SEQ ID NO: 15525 - DNA, 20 bp, synthetic construct
  misc_feature 1..20: note = Description of Artificial Sequence: Synthetic oligonucleotide
  misc_feature 1..20: note = Target: ANGPTL3; (+) strand; PAM type: YTN; PAM sequence: TTA
  source 1..20: mol_type = other DNA
tttaaatataatatatagaa

SEQ ID NO: 15526 - DNA, 20 bp, synthetic construct
  misc_feature 1..20: note = Description of Artificial Sequence: Synthetic oligonucleotide
  misc_feature 1..20: note = Target: ANGPTL3; (+) strand; PAM type: YTN; PAM sequence: TTT
  source 1..20: mol_type = other DNA
aaatataatatatagaatgt

SEQ ID NO: 15527 - DNA, 20 bp, synthetic construct
  misc_feature 1..20: note = Description of Artificial Sequence: Synthetic oligonucleotide
  misc_feature 1..20: note = Target: ANGPTL3; (+) strand; PAM type: YTN; PAM sequence: TTA
  source 1..20: mol_type = other DNA
aatataatatatagaatgta

SEQ ID NO: 15528 - DNA, 20 bp, synthetic construct
  misc_feature 1..20: note = Description of Artificial Sequence: Synthetic oligonucleotide
  misc_feature 1..20: note = Target: ANGPTL3; (+) strand; PAM type: YTN; PAM sequence: CTT
  source 1..20: mol_type = other DNA
ataatgaattagttaactca

SEQ ID NO: 15529 - DNA, 20 bp, synthetic construct
  misc_feature 1..20: note = Description of Artificial Sequence: Synthetic oligonucleotide
  misc_feature 1..20: note = Target: ANGPTL3; (+) strand; PAM type: YTN; PAM sequence: TTA
  source 1..20: mol_type = other DNA
taatgaattagttaactcaa

SEQ ID NO: 15530 - DNA, 20 bp, synthetic construct
  misc_feature 1..20: note = Description of Artificial Sequence: Synthetic oligonucleotide
  misc_feature 1..20: note = Target: ANGPTL3; (+) strand; PAM type: YTN; PAM sequence: TTA
  source 1..20: mol_type = other DNA
gttaactcaatgcaaattat

SEQ ID NO: 15531 - DNA, 20 bp, synthetic construct
  misc_feature 1..20: note = Description of Artificial Sequence: Synthetic oligonucleotide
  misc_feature 1..20: note = Target: ANGPTL3; (+) strand; PAM type: YTN; PAM sequence: TTA
  source 1..20: mol_type = other DNA
actcaatgcaaattattcta

SEQ ID NO: 15532 - DNA, 20 bp, synthetic construct
  misc_feature 1..20: note = Description of Artificial Sequence: Synthetic oligonucleotide
  misc_feature 1..20: note = Target: ANGPTL3; (+) strand; PAM type: YTN; PAM sequence: CTC
  source 1..20: mol_type = other DNA
aatgcaaattattctatttt

SEQ ID NO: 15533 - DNA, 20 bp, synthetic construct
  misc_feature 1..20: note = Description of Artificial Sequence: Synthetic oligonucleotide
  misc_feature 1..20: note = Target: ANGPTL3; (+) strand; PAM type: YTN; PAM sequence: TTA
  source 1..20: mol_type = other DNA
ttctattttgattacaaata

SEQ ID NO: 15534 - DNA, 20 bp, synthetic construct
  misc_feature 1..20: note = Description of Artificial Sequence: Synthetic oligonucleotide
  misc_feature 1..20: note = Target: ANGPTL3; (+) strand; PAM type: YTN; PAM sequence: TTC
  source 1..20: mol_type = other DNA
tattttgattacaaatagta

SEQ ID NO: 15535 - DNA, 20 bp, synthetic construct
  misc_feature 1..20: note = Description of Artificial Sequence: Synthetic oligonucleotide
  misc_feature 1..20: note = Target: ANGPTL3; (+) strand; PAM type: YTN; PAM sequence: CTA
  source 1..20: mol_type = other DNA
ttttgattacaaatagtaaa

SEQ ID NO: 15536 - DNA, 20 bp, synthetic construct
  misc_feature 1..20: note = Description of Artificial Sequence: Synthetic oligonucleotide
  misc_feature 1..20: note = Target: ANGPTL3; (+) strand; PAM type: YTN; PAM sequence: TTT
  source 1..20: mol_type = other DNA
tgattacaaatagtaaaata

SEQ ID NO: 15537 - DNA, 20 bp, synthetic construct
  misc_feature 1..20: note = Description of Artificial Sequence: Synthetic oligonucleotide
  misc_feature 1..20: note = Target: ANGPTL3; (+) strand; PAM type: YTN; PAM sequence: TTT
  source 1..20: mol_type = other DNA
gattacaaatagtaaaataa

SEQ ID NO: 15538 - DNA, 20 bp, synthetic construct
  misc_feature 1..20: note = Description of Artificial Sequence: Synthetic oligonucleotide
  misc_feature 1..20: note = Target: ANGPTL3; (+) strand; PAM type: YTN; PAM sequence: TTG
  source 1..20: mol_type = other DNA
attacaaatagtaaaataag

SEQ ID NO: 15539 - DNA, 20 bp, synthetic construct
  misc_feature 1..20: note = Description of Artificial Sequence: Synthetic oligonucleotide
  misc_feature 1..20: note = Target: ANGPTL3; (+) strand; PAM type: YTN; PAM sequence: TTA
  source 1..20: mol_type = other DNA
caaatagtaaaataagcaag

SEQ ID NO: 15540 - DNA, 20 bp, synthetic construct
  misc_feature 1..20: note = Description of Artificial Sequence: Synthetic oligonucleotide
  misc_feature 1..20: note = Target: ANGPTL3; (+) strand; PAM type: YTN; PAM sequence: TTT
  source 1..20: mol_type = other DNA
aaaatccaaaaagcacatac

SEQ ID NO: 15541 - DNA, 20 bp, synthetic construct
  misc_feature 1..20: note = Description of Artificial Sequence: Synthetic oligonucleotide
  misc_feature 1..20: note = Target: ANGPTL3; (+) strand; PAM type: YTN; PAM sequence: TTA
  source 1..20: mol_type = other DNA
aaatccaaaaagcacataca

SEQ ID NO: 15542 - DNA, 20 bp, synthetic construct
  misc_feature 1..20: note = Description of Artificial Sequence: Synthetic oligonucleotide
  misc_feature 1..20: note = Target: ANGPTL3; (+) strand; PAM type: YTN; PAM sequence: CTA
  source 1..20: mol_type = other DNA
agtactcacttataaagtag

SEQ ID NO: 15543 - DNA, 20 bp, synthetic construct
  misc_feature 1..20: note = Description of Artificial Sequence: Synthetic oligonucleotide
  misc_feature 1..20: note = Target: ANGPTL3; (+) strand; PAM type: YTN; PAM sequence: CTC
  source 1..20: mol_type = other DNA
acttataaagtagaagacat

SEQ ID NO: 15544 - DNA, 20 bp, synthetic construct
  misc_feature 1..20: note = Description of Artificial Sequence: Synthetic oligonucleotide
  misc_feature 1..20: note = Target: ANGPTL3; (+) strand; PAM type: YTN; PAM sequence: CTT
  source 1..20: mol_type = other DNA
ataaagtagaagacattcat

SEQ ID NO: 15545 - DNA, 20 bp, synthetic construct
  misc_feature 1..20: note = Description of Artificial Sequence: Synthetic oligonucleotide
  misc_feature 1..20: note = Target: ANGPTL3; (+) strand; PAM type: YTN; PAM sequence: TTA
  source 1..20: mol_type = other DNA
taaagtagaagacattcatt

SEQ ID NO: 15546 - DNA, 20 bp, synthetic construct
  misc_feature 1..20: note = Description of Artificial Sequence: Synthetic oligonucleotide
  misc_feature 1..20: note = Target: ANGPTL3; (+) strand; PAM type: YTN; PAM sequence: TTC
  source 1..20: mol_type = other DNA
attattatatcaaattttta

SEQ ID NO: 15547 - DNA, 20 bp, synthetic construct
  misc_feature 1..20: note = Description of Artificial Sequence: Synthetic oligonucleotide
  misc_feature 1..20: note = Target: ANGPTL3; (+) strand; PAM type: YTN; PAM sequence: TTA
  source 1..20: mol_type = other DNA
ttatatcaaatttttaaatg

SEQ ID NO: 15548 - DNA, 20 bp, synthetic construct
  misc_feature 1..20: note = Description of Artificial Sequence: Synthetic oligonucleotide
  misc_feature 1..20: note = Target: ANGPTL3; (+) strand; PAM type: YTN; PAM sequence: TTA
  source 1..20: mol_type = other DNA
tatcaaatttttaaatgctc

SEQ ID NO: 15549 - DNA, 20 bp, synthetic construct
  misc_feature 1..20: note = Description of Artificial Sequence: Synthetic oligonucleotide
  misc_feature 1..20: note = Target: ANGPTL3; (+) strand; PAM type: YTN; PAM sequence: TTT
  source 1..20: mol_type = other DNA
ttaaatgctcagtactattt

SEQ ID NO: 15550 - DNA, 20 bp, synthetic construct
  misc_feature 1..20: note = Description of Artificial Sequence: Synthetic oligonucleotide
  misc_feature 1..20: note = Target: ANGPTL3; (+) strand; PAM type: YTN; PAM sequence: TTT
  source 1..20: mol_type = other DNA
taaatgctcagtactatttg

SEQ ID NO: 15551 - DNA, 20 bp, synthetic construct
  misc_feature 1..20: note = Description of Artificial Sequence: Synthetic oligonucleotide
  misc_feature 1..20: note = Target: ANGPTL3; (+) strand; PAM type: YTN; PAM sequence: TTT
  source 1..20: mol_type = other DNA
aaatgctcagtactatttga

SEQ ID NO: 15552 - DNA, 20 bp, synthetic construct
  misc_feature 1..20: note = Description of Artificial Sequence: Synthetic oligonucleotide
  misc_feature 1..20: note = Target: ANGPTL3; (+) strand; PAM type: YTN; PAM sequence: TTA
  source 1..20: mol_type = other DNA
aatgctcagtactatttgac

SEQ ID NO: 15553 - DNA, 20 bp, synthetic construct
  misc_feature 1..20: note = Description of Artificial Sequence: Synthetic oligonucleotide
  misc_feature 1..20: note = Target: ANGPTL3; (+) strand; PAM type: YTN; PAM sequence: CTC
  source 1..20: mol_type = other DNA
agtactatttgaccatttaa

SEQ ID NO: 15554 - DNA, 20 bp, synthetic construct
  misc_feature 1..20: note = Description of Artificial Sequence: Synthetic oligonucleotide
  misc_feature 1..20: note = Target: ANGPTL3; (+) strand; PAM type: YTN; PAM sequence: CTA
  source 1..20: mol_type = other DNA
tttgaccatttaaaaatttt

SEQ ID NO: 15555 - DNA, 20 bp, synthetic construct
  misc_feature 1..20: note = Description of Artificial Sequence: Synthetic oligonucleotide
  misc_feature 1..20: note = Target: ANGPTL3; (+) strand; PAM type: YTN; PAM sequence: TTT
  source 1..20: mol_type = other DNA
gaccatttaaaaattttgta

SEQ ID NO: 15556 - DNA, 20 bp, synthetic construct
  misc_feature 1..20: note = Description of Artificial Sequence: Synthetic oligonucleotide
  misc_feature 1..20: note = Target: ANGPTL3; (+) strand; PAM type: YTN; PAM sequence: TTG
  source 1..20: mol_type = other DNA
accatttaaaaattttgtat

SEQ ID NO: 15557 - DNA, 20 bp, synthetic construct
  misc_feature 1..20: note = Description of Artificial Sequence: Synthetic oligonucleotide
  misc_feature 1..20: note = Target: ANGPTL3; (+) strand; PAM type: YTN; PAM sequence: TTT
  source 1..20: mol_type = other DNA
aaaaattttgtattcaaact

SEQ ID NO: 15558 - DNA, 20 bp, synthetic construct
  misc_feature 1..20: note = Description of Artificial Sequence: Synthetic oligonucleotide
  misc_feature 1..20: note = Target: ANGPTL3; (+) strand; PAM type: YTN; PAM sequence: TTA
  source 1..20: mol_type = other DNA
aaaattttgtattcaaacta

SEQ ID NO: 15559 - DNA, 20 bp, synthetic construct
  misc_feature 1..20: note = Description of Artificial Sequence: Synthetic oligonucleotide
  misc_feature 1..20: note = Target: ANGPTL3; (+) strand; PAM type: YTN; PAM sequence: TTT
  source 1..20: mol_type = other DNA
tgtattcaaactaccagtga

SEQ ID NO: 15560 - DNA, 20 bp, synthetic construct
  misc_feature 1..20: note = Description of Artificial Sequence: Synthetic oligonucleotide
  misc_feature 1..20: note = Target: ANGPTL3; (+) strand; PAM type: YTN; PAM sequence: TTT
  source 1..20: mol_type = other DNA
gtattcaaactaccagtgaa

SEQ ID NO: 15561 - DNA, 20 bp, synthetic construct
  misc_feature 1..20: note = Description of Artificial Sequence: Synthetic oligonucleotide
  misc_feature 1..20: note = Target: ANGPTL3; (+) strand; PAM type: YTN; PAM sequence: TTG
  source 1..20: mol_type = other DNA
tattcaaactaccagtgaaa

SEQ ID NO: 15562 - DNA, 20 bp, synthetic construct
  misc_feature 1..20: note = Description of Artificial Sequence: Synthetic oligonucleotide
  misc_feature 1..20: note = Target: ANGPTL3; (+) strand; PAM type: YTN; PAM sequence: TTC
  source 1..20: mol_type = other DNA
aaactaccagtgaaagccct

SEQ ID NO: 15563 - DNA, 20 bp, synthetic construct
  misc_feature 1..20: note = Description of Artificial Sequence: Synthetic oligonucleotide
  misc_feature 1..20: note = Target: ANGPTL3; (+) strand; PAM type: YTN; PAM sequence: CTA
  source 1..20: mol_type = other DNA
ccagtgaaagccctacctag

SEQ ID NO: 15564 - DNA, 20 bp, synthetic construct
  misc_feature 1..20: note = Description of Artificial Sequence: Synthetic oligonucleotide
  misc_feature 1..20: note = Target: ANGPTL3; (+) strand; PAM type: YTN; PAM sequence: CTA
  source 1..20: mol_type = other DNA
cctagaaggtatactcagtg

SEQ ID NO: 15565 - DNA, 20 bp, synthetic construct
  misc_feature 1..20: note = Description of Artificial Sequence: Synthetic oligonucleotide
  misc_feature 1..20: note = Target: ANGPTL3; (+) strand; PAM type: YTN; PAM sequence: CTA
  source 1..20: mol_type = other DNA
gaaggtatactcagtgataa

SEQ ID NO: 15566 - DNA, 20 bp, synthetic construct
  misc_feature 1..20: note = Description of Artificial Sequence: Synthetic oligonucleotide
  misc_feature 1..20: note = Target: ANGPTL3; (+) strand; PAM type: YTN; PAM sequence: CTC
  source 1..20: mol_type = other DNA
agtgataagttttgtagctc

SEQ ID NO: 15567 - DNA, 20 bp, synthetic construct
  misc_feature 1..20: note = Description of Artificial Sequence: Synthetic oligonucleotide
  misc_feature 1..20: note = Target: ANGPTL3; (+) strand; PAM type: YTN; PAM sequence: TTT
  source 1..20: mol_type = other DNA
tgtagctccaaatcttctaa

SEQ ID NO: 15568 - DNA, 20 bp, synthetic construct
  misc_feature 1..20: note = Description of Artificial Sequence: Synthetic oligonucleotide
  misc_feature 1..20: note = Target: ANGPTL3; (+) strand; PAM type: YTN; PAM sequence: TTT
  source 1..20: mol_type = other DNA
gtagctccaaatcttctaat

SEQ ID NO: 15569 - DNA, 20 bp, synthetic construct
  misc_feature 1..20: note = Description of Artificial Sequence: Synthetic oligonucleotide
  misc_feature 1..20: note = Target: ANGPTL3; (+) strand; PAM type: YTN; PAM sequence: TTG
  source 1..20: mol_type = other DNA
tagctccaaatcttctaata

SEQ ID NO: 15570 - DNA, 20 bp, synthetic construct
  misc_feature 1..20: note = Description of Artificial Sequence: Synthetic oligonucleotide
  misc_feature 1..20: note = Target: ANGPTL3; (+) strand; PAM type: YTN; PAM sequence: CTC
  source 1..20: mol_type = other DNA
caaatcttctaatagtgagt

SEQ ID NO: 15571 - DNA, 20 bp, synthetic construct
  misc_feature 1..20: note = Description of Artificial Sequence: Synthetic oligonucleotide
  misc_feature 1..20: note = Target: ANGPTL3; (+) strand; PAM type: YTN; PAM sequence: CTT
  source 1..20: mol_type = other DNA
ctaatagtgagtgtaacccc

SEQ ID NO: 15572 - DNA, 20 bp, synthetic construct
  misc_feature 1..20: note = Description of Artificial Sequence: Synthetic oligonucleotide
  misc_feature 1..20: note = Target: ANGPTL3; (+) strand; PAM type: YTN; PAM sequence: TTC
  source 1..20: mol_type = other DNA
taatagtgagtgtaacccca

SEQ ID NO: 15573 - DNA, 20 bp, synthetic construct
  misc_feature 1..20: note = Description of Artificial Sequence: Synthetic oligonucleotide
  misc_feature 1..20: note = Target: ANGPTL3; (+) strand; PAM type: YTN; PAM sequence: CTA
  source 1..20: mol_type = other DNA
atagtgagtgtaaccccaaa

SEQ ID NO: 15574 - DNA, 20 bp, synthetic construct
  misc_feature 1..20: note = Description of Artificial Sequence: Synthetic oligonucleotide
  misc_feature 1..20: note = Target: ANGPTL3; (+) strand; PAM type: YTN; PAM sequence: CTG
  source 1..20: mol_type = other DNA
acaggtaagtcgagaatact

SEQ ID NO: 15575 - DNA, 20 bp, synthetic construct
  misc_feature 1..20: note = Description of Artificial Sequence: Synthetic oligonucleotide
  misc_feature 1..20: note = Target: ANGPTL3; (+) strand; PAM type: YTN; PAM sequence: CTC
  source 1..20: mol_type = other DNA
acttaattctggtaagaaag

SEQ ID NO: 15576 - DNA, 20 bp, synthetic construct
  misc_feature 1..20: note = Description of Artificial Sequence: Synthetic oligonucleotide
  misc_feature 1..20: note = Target: ANGPTL3; (+) strand; PAM type: YTN; PAM sequence: CTT
  source 1..20: mol_type = other DNA
aattctggtaagaaagcaac

SEQ ID NO: 15577 - DNA, 20 bp, synthetic construct
  misc_feature 1..20: note = Description of Artificial Sequence: Synthetic oligonucleotide
  misc_feature 1..20: note = Target: ANGPTL3; (+) strand; PAM type: YTN; PAM sequence: TTA
  source 1..20: mol_type = other DNA
attctggtaagaaagcaacc

SEQ ID NO: 15578 - DNA, 20 bp, synthetic construct
  misc_feature 1..20: note = Description of Artificial Sequence: Synthetic oligonucleotide
  misc_feature 1..20: note = Target: ANGPTL3; (+) strand; PAM type: YTN; PAM sequence: TTC
  source 1..20: mol_type = other DNA
tggtaagaaagcaacccatt

SEQ ID NO: 15579 - DNA, 20 bp, synthetic construct
  misc_feature 1..20: note = Description of Artificial Sequence: Synthetic oligonucleotide
  misc_feature 1..20: note = Target: ANGPTL3; (+) strand; PAM type: YTN; PAM sequence: CTG
  source 1..20: mol_type = other DNA
gtaagaaagcaacccatttg

SEQ ID NO: 15580 - DNA, 20 bp, synthetic construct
  misc_feature 1..20: note = Description of Artificial Sequence: Synthetic oligonucleotide
  misc_feature 1..20: note = Target: ANGPTL3; (+) strand; PAM type: YTN; PAM sequence: TTT
  source 1..20: mol_type = other DNA
gtacttgtatttaccagcaa

SEQ ID NO: 15581 - DNA, 20 bp, synthetic construct
  misc_feature 1..20: note = Description of Artificial Sequence: Synthetic oligonucleotide
  misc_feature 1..20: note = Target: ANGPTL3; (+) strand; PAM type: YTN; PAM sequence: TTG
  source 1..20: mol_type = other DNA
tacttgtatttaccagcaat

SEQ ID NO: 15582 - DNA, 20 bp, synthetic construct
  misc_feature 1..20: note = Description of Artificial Sequence: Synthetic oligonucleotide
  misc_feature 1..20: note = Target: ANGPTL3; (+) strand; PAM type: YTN; PAM sequence: CTT
  source 1..20: mol_type = other DNA
gtatttaccagcaatcctta

SEQ ID NO: 15583 - DNA, 20 bp, synthetic construct
  misc_feature 1..20: note = Description of Artificial Sequence: Synthetic oligonucleotide
  misc_feature 1..20: note = Target: ANGPTL3; (+) strand; PAM type: YTN; PAM sequence: TTG
  source 1..20: mol_type = other DNA
tatttaccagcaatccttaa

SEQ ID NO: 15584 - DNA, 20 bp, synthetic construct
  misc_feature 1..20: note = Description of Artificial Sequence: Synthetic oligonucleotide
  misc_feature 1..20: note = Target: ANGPTL3; (+) strand; PAM type: YTN; PAM sequence: TTT
  source 1..20: mol_type = other DNA
accagcaatccttaaaatga

SEQ ID NO: 15585 - DNA, 20 bp, synthetic construct
  misc_feature 1..20: note = Description of Artificial Sequence: Synthetic oligonucleotide
  misc_feature 1..20: note = Target: ANGPTL3; (+) strand; PAM type: YTN; PAM sequence: TTA
  source 1..20: mol_type = other DNA
ccagcaatccttaaaatgaa

SEQ ID NO: 15586 - DNA, 20 bp, synthetic construct
  misc_feature 1..20: note = Description of Artificial Sequence: Synthetic oligonucleotide
  misc_feature 1..20: note = Target: ANGPTL3; (+) strand; PAM type: YTN; PAM sequence: CTT
  source 1..20: mol_type = other DNA
aaaatgaagcttcctactaa

SEQ ID NO: 15587 - DNA, 20 bp, synthetic construct
  misc_feature 1..20: note = Description of Artificial Sequence: Synthetic oligonucleotide
  misc_feature 1..20: note = Target: ANGPTL3; (+) strand; PAM type: YTN; PAM sequence: TTA
  source 1..20: mol_type = other DNA
aaatgaagcttcctactaac

SEQ ID NO: 15588 - DNA, 20 bp, synthetic construct
  misc_feature 1..20: note = Description of Artificial Sequence: Synthetic oligonucleotide
  misc_feature 1..20: note = Target: ANGPTL3; (+) strand; PAM type: YTN; PAM sequence: CTT
  source 1..20: mol_type = other DNA
cctactaactcaatagcaat

SEQ ID NO: 15589 - DNA, 20 bp, synthetic construct
  misc_feature 1..20: note = Description of Artificial Sequence: Synthetic oligonucleotide
  misc_feature 1..20: note = Target: ANGPTL3; (+) strand; PAM type: YTN; PAM sequence: TTC
  source 1..20: mol_type = other DNA
ctactaactcaatagcaata

SEQ ID NO: 15590 - DNA, 20 bp, synthetic construct
  misc_feature 1..20: note = Description of Artificial Sequence: Synthetic oligonucleotide
  misc_feature 1..20: note = Target: ANGPTL3; (+) strand; PAM type: YTN; PAM sequence: CTA
  source 1..20: mol_type = other DNA
ctaactcaatagcaataaga

SEQ ID NO: 15591 - DNA, 20 bp, synthetic construct
  misc_feature 1..20: note = Description of Artificial Sequence: Synthetic oligonucleotide
  misc_feature 1..20: note = Target: ANGPTL3; (+) strand; PAM type: YTN; PAM sequence: CTA
  source 1..20: mol_type = other DNA
actcaatagcaataagacaa

SEQ ID NO: 15592 - DNA, 20 bp, synthetic construct
  misc_feature 1..20: note = Description of Artificial Sequence: Synthetic oligonucleotide
  misc_feature 1..20: note = Target: ANGPTL3; (+) strand; PAM type: YTN; PAM sequence: CTC
  source 1..20: mol_type = other DNA
aatagcaataagacaatagt

SEQ ID NO: 15593 - DNA, 20 bp, synthetic construct
  misc_feature 1..20: note = Description of Artificial Sequence: Synthetic oligonucleotide
  misc_feature 1..20: note = Target: ANGPTL3; (+) strand; PAM type: YTN; PAM sequence: TTT
  source 1..20: mol_type = other DNA
aatgaaaacagtattttata

SEQ ID NO: 15594 - DNA, 20 bp, synthetic construct
  misc_feature 1..20: note = Description of Artificial Sequence: Synthetic oligonucleotide
  misc_feature 1..20: note = Target: ANGPTL3; (+) strand; PAM type: YTN; PAM sequence: TTA
  source 1..20: mol_type = other DNA
atgaaaacagtattttataa

SEQ ID NO: 15595 - DNA, 20 bp, synthetic construct
  misc_feature 1..20: note = Description of Artificial Sequence: Synthetic oligonucleotide
  misc_feature 1..20: note = Target: ANGPTL3; (+) strand; PAM type: YTN; PAM sequence: TTT
  source 1..20: mol_type = other DNA
tataaatactttaataaaaa

SEQ ID NO: 15596 - DNA, 20 bp, synthetic construct
  misc_feature 1..20: note = Description of Artificial Sequence: Synthetic oligonucleotide
  misc_feature 1..20: note = Target: ANGPTL3; (+) strand; PAM type: YTN; PAM sequence: TTT
  source 1..20: mol_type = other DNA
ataaatactttaataaaaag

SEQ ID NO: 15597 - DNA, 20 bp, synthetic construct
  misc_feature 1..20: note = Description of Artificial Sequence: Synthetic oligonucleotide
  misc_feature 1..20: note = Target: ANGPTL3; (+) strand; PAM type: YTN; PAM sequence: TTA
  source 1..20: mol_type = other DNA
taaatactttaataaaaagg

SEQ ID NO: 15598 - DNA, 20 bp, synthetic construct
  misc_feature 1..20: note = Description of Artificial Sequence: Synthetic oligonucleotide
  misc_feature 1..20: note = Target: ANGPTL3; (+) strand; PAM type: YTN; PAM sequence: CTT
  source 1..20: mol_type = other DNA
taataaaaaggattgtgatg

SEQ ID NO: 15599 - DNA, 20 bp, synthetic construct
  misc_feature 1..20: note = Description of Artificial Sequence: Synthetic oligonucleotide
  misc_feature 1..20: note = Target: ANGPTL3; (+) strand; PAM type: YTN; PAM sequence: TTT
  source 1..20: mol_type = other DNA
aataaaaaggattgtgatga

SEQ ID NO: 15600 - DNA, 20 bp, synthetic construct
  misc_feature 1..20: note = Description of Artificial Sequence: Synthetic oligonucleotide
  misc_feature 1..20: note = Target: ANGPTL3; (+) strand; PAM type: YTN; PAM sequence: TTA
  source 1..20: mol_type = other DNA
ataaaaaggattgtgatgaa

SEQ ID NO: 15601 - DNA, 20 bp, synthetic construct
  misc_feature 1..20: note = Description of Artificial Sequence: Synthetic oligonucleotide
  misc_feature 1..20: note = Target: ANGPTL3; (+) strand; PAM type: YTN; PAM sequence: TTG
  source 1..20: mol_type = other DNA
tgatgaagaacaatctattt

SEQ ID NO: 15602 - DNA, 20 bp, synthetic construct
  misc_feature 1..20: note = Description of Artificial Sequence: Synthetic oligonucleotide
  misc_feature 1..20: note = Target: ANGPTL3; (+) strand; PAM type: YTN; PAM sequence: CTA
  source 1..20: mol_type = other DNA
tttatatttgttatttgttt

SEQ ID NO: 15603 - DNA, 20 bp, synthetic construct
  misc_feature 1..20: note = Description of Artificial Sequence: Synthetic oligonucleotide
  misc_feature 1..20: note = Target: ANGPTL3; (+) strand; PAM type: YTN; PAM sequence: TTT
  source 1..20: mol_type = other DNA
atatttgttatttgttttta

SEQ ID NO: 15604 - DNA, 20 bp, synthetic construct
  misc_feature 1..20: note = Description of Artificial Sequence: Synthetic oligonucleotide
  misc_feature 1..20: note = Target: ANGPTL3; (+) strand; PAM type: YTN; PAM sequence: TTA
  source 1..20: mol_type = other DNA
tatttgttatttgtttttaa

SEQ ID NO: 15605 - DNA, 20 bp, synthetic construct
  misc_feature 1..20: note = Description of Artificial Sequence: Synthetic oligonucleotide
  misc_feature 1..20: note = Target: ANGPTL3; (+) strand; PAM type: YTN; PAM sequence: TTT
  source 1..20: mol_type = other DNA
gttatttgtttttaattcca

SEQ ID NO: 15606 - DNA, 20 bp, synthetic construct
  misc_feature 1..20: note = Description of Artificial Sequence: Synthetic oligonucleotide
  misc_feature 1..20: note = Target: ANGPTL3; (+) strand; PAM type: YTN; PAM sequence: TTG
  source 1..20: mol_type = other DNA
ttatttgtttttaattccaa

SEQ ID NO: 15607 - DNA, 20 bp, synthetic construct
  misc_feature 1..20: note = Description of Artificial Sequence: Synthetic oligonucleotide
  misc_feature 1..20: note = Target: ANGPTL3; (+) strand; PAM type: YTN; PAM sequence: TTA
  source 1..20: mol_type = other DNA
tttgtttttaattccaataa

SEQ ID NO: 15608 - DNA, 20 bp, synthetic construct
  misc_feature 1..20: note = Description of Artificial Sequence: Synthetic oligonucleotide
  misc_feature 1..20: note = Target: ANGPTL3; (+) strand; PAM type: YTN; PAM sequence: TTT
  source 1..20: mol_type = other DNA
gtttttaattccaataaaaa

SEQ ID NO: 15609 - DNA, 20 bp, synthetic construct
  misc_feature 1..20: note = Description of Artificial Sequence: Synthetic oligonucleotide
  misc_feature 1..20: note = Target: ANGPTL3; (+) strand; PAM type: YTN; PAM sequence: TTG
  source 1..20: mol_type = other DNA
tttttaattccaataaaaat

SEQ ID NO: 15610 - DNA, 20 bp, synthetic construct
  misc_feature 1..20: note = Description of Artificial Sequence: Synthetic oligonucleotide
  misc_feature 1..20: note = Target: ANGPTL3; (+) strand; PAM type: YTN; PAM sequence: TTT
  source 1..20: mol_type = other DNA
ttaattccaataaaaataat

SEQ ID NO: 15611 - DNA, 20 bp, synthetic construct
  misc_feature 1..20: note = Description of Artificial Sequence: Synthetic oligonucleotide
  misc_feature 1..20: note = Target: ANGPTL3; (+) strand; PAM type: YTN; PAM sequence: TTT
  source 1..20: mol_type = other DNA
taattccaataaaaataatt

SEQ ID NO: 15612 - DNA, 20 bp, synthetic construct
  misc_feature 1..20: note = Description of Artificial Sequence: Synthetic oligonucleotide
  misc_feature 1..20: note = Target: ANGPTL3; (+) strand; PAM type: YTN; PAM sequence: TTT
  source 1..20: mol_type = other DNA
aattccaataaaaataattt

SEQ ID NO: 15613 - DNA, 20 bp, synthetic construct
  misc_feature 1..20: note = Description of Artificial Sequence: Synthetic oligonucleotide
  misc_feature 1..20: note = Target: ANGPTL3; (+) strand; PAM type: YTN; PAM sequence: TTA
  source 1..20: mol_type = other DNA
attccaataaaaataatttt

SEQ ID NO: 15614 - DNA, 20 bp, synthetic construct
  misc_feature 1..20: note = Description of Artificial Sequence: Synthetic oligonucleotide
  misc_feature 1..20: note = Target: ANGPTL3; (+) strand; PAM type: YTN; PAM sequence: TTC
  source 1..20: mol_type = other DNA
caataaaaataatttttaaa

SEQ ID NO: 15615 - DNA, 20 bp, synthetic construct
  misc_feature 1..20: note = Description of Artificial Sequence: Synthetic oligonucleotide
  misc_feature 1..20: note = Target: ANGPTL3; (+) strand; PAM type: YTN; PAM sequence: TTT
  source 1..20: mol_type = other DNA
ttaaaattacagaaaaaagt

SEQ ID NO: 15616 - DNA, 20 bp, synthetic construct
  misc_feature 1..20: note = Description of Artificial Sequence: Synthetic oligonucleotide
  misc_feature 1..20: note = Target: ANGPTL3; (+) strand; PAM type: YTN; PAM sequence: TTT
  source 1..20: mol_type = other DNA
taaaattacagaaaaaagtt

SEQ ID NO: 15617 - DNA, 20 bp, synthetic construct
  misc_feature 1..20: note = Description of Artificial Sequence: Synthetic oligonucleotide
  misc_feature 1..20: note = Target: ANGPTL3; (+) strand; PAM type: YTN; PAM sequence: TTT
  source 1..20: mol_type = other DNA
aaaattacagaaaaaagtta

SEQ ID NO: 15618 - DNA, 20 bp, synthetic construct
  misc_feature 1..20: note = Description of Artificial Sequence: Synthetic oligonucleotide
  misc_feature 1..20: note = Target: ANGPTL3; (+) strand; PAM type: YTN; PAM sequence: TTA
  source 1..20: mol_type = other DNA
aaattacagaaaaaagttat

SEQ ID NO: 15619 - DNA, 20 bp, synthetic construct
  misc_feature 1..20: note = Description of Artificial Sequence: Synthetic oligonucleotide
  misc_feature 1..20: note = Target: ANGPTL3; (+) strand; PAM type: YTN; PAM sequence: TTA
  source 1..20: mol_type = other DNA
cagaaaaaagttattaagaa

SEQ ID NO: 15620 - DNA, 20 bp, synthetic construct
  misc_feature 1..20: note = Description of Artificial Sequence: Synthetic oligonucleotide
  misc_feature 1..20: note = Target: ANGPTL3; (+) strand; PAM type: YTN; PAM sequence: TTA
  source 1..20: mol_type = other DNA
ttaagaaccatgcttttaaa

SEQ ID NO: 15621 - DNA, 20 bp, synthetic construct
  misc_feature 1..20: note = Description of Artificial Sequence: Synthetic oligonucleotide
  misc_feature 1..20: note = Target: ANGPTL3; (+) strand; PAM type: YTN; PAM sequence: TTA
  source 1..20: mol_type = other DNA
agaaccatgcttttaaattt

SEQ ID NO: 15622 - DNA, 20 bp, synthetic construct
  misc_feature 1..20: note = Description of Artificial Sequence: Synthetic oligonucleotide
  misc_feature 1..20: note = Target: ANGPTL3; (+) strand; PAM type: YTN; PAM sequence: CTT
  source 1..20: mol_type = other DNA
ttaaatttaaaatgattttt

SEQ ID NO: 15623 - DNA, 20 bp, synthetic construct
  misc_feature 1..20: note = Description of Artificial Sequence: Synthetic oligonucleotide
  misc_feature 1..20: note = Target: ANGPTL3; (+) strand; PAM type: YTN; PAM sequence: TTT
  source 1..20: mol_type = other DNA
taaatttaaaatgatttttt

SEQ ID NO: 15624 - DNA, 20 bp, synthetic construct
  misc_feature 1..20: note = Description of Artificial Sequence: Synthetic oligonucleotide
  misc_feature 1..20: note = Target: ANGPTL3; (+) strand; PAM type: YTN; PAM sequence: TTT
  source 1..20: mol_type = other DNA
aaatttaaaatgatttttta

SEQ ID NO: 15625 - DNA, 20 bp, synthetic construct
  misc_feature 1..20: note = Description of Artificial Sequence: Synthetic oligonucleotide
  misc_feature 1..20: note = Target: ANGPTL3; (+) strand; PAM type: YTN; PAM sequence: TTA
  source 1..20: mol_type = other DNA
aatttaaaatgattttttaa

SEQ ID NO: 15626 - DNA, 20 bp, synthetic construct
  misc_feature 1..20: note = Description of Artificial Sequence: Synthetic oligonucleotide
  misc_feature 1..20: note = Target: ANGPTL3; (+) strand; PAM type: YTN; PAM sequence: TTT
  source 1..20: mol_type = other DNA
aaaatgattttttaaattta

SEQ ID NO: 15627 - DNA, 20 bp, synthetic construct
  misc_feature 1..20: note = Description of Artificial Sequence: Synthetic oligonucleotide
  misc_feature 1..20: note = Target: ANGPTL3; (+) strand; PAM type: YTN; PAM sequence: TTA
  source 1..20: mol_type = other DNA
aaatgattttttaaatttat

SEQ ID NO: 15628 - DNA, 20 bp, synthetic construct
  misc_feature 1..20: note = Description of Artificial Sequence: Synthetic oligonucleotide
  misc_feature 1..20: note = Target: ANGPTL3; (+) strand; PAM type: YTN; PAM sequence: TTT
  source 1..20: mol_type = other DNA
tttaaatttattcctgtctt

SEQ ID NO: 15629 - DNA, 20 bp, synthetic construct
  misc_feature 1..20: note = Description of Artificial Sequence: Synthetic oligonucleotide
  misc_feature 1..20: note = Target: ANGPTL3; (+) strand; PAM type: YTN; PAM sequence: TTT
  source 1..20: mol_type = other DNA
ttaaatttattcctgtcttt

SEQ ID NO: 15630 - DNA, 20 bp, synthetic construct
  misc_feature 1..20: note = Description of Artificial Sequence: Synthetic oligonucleotide
  misc_feature 1..20: note = Target: ANGPTL3; (+) strand; PAM type: YTN; PAM sequence: TTT
  source 1..20: mol_type = other DNA
taaatttattcctgtctttt

SEQ ID NO: 15631 - DNA, 20 bp, synthetic construct
  misc_feature 1..20: note = Description of Artificial Sequence: Synthetic oligonucleotide
  misc_feature 1..20: note = Target: ANGPTL3; (+) strand; PAM type: YTN; PAM sequence: TTT
  source 1..20: mol_type = other DNA
aaatttattcctgtcttttt

SEQ ID NO: 15632 - DNA, 20 bp, synthetic construct
  misc_feature 1..20: note = Description of Artificial Sequence: Synthetic oligonucleotide
  misc_feature 1..20: note = Target: ANGPTL3; (+) strand; PAM type: YTN; PAM sequence: TTA
  source 1..20: mol_type = other DNA
aatttattcctgtctttttc

SEQ ID NO: 15633 - DNA, 20 bp, synthetic construct
  misc_feature 1..20: note = Description of Artificial Sequence: Synthetic oligonucleotide
  misc_feature 1..20: note = Target: ANGPTL3; (+) strand; PAM type: YTN; PAM sequence: TTT
  source 1..20: mol_type = other DNA
attcctgtctttttctacaa

SEQ ID NO: 15634 - DNA, 20 bp, synthetic construct
  misc_feature 1..20: note = Description of Artificial Sequence: Synthetic oligonucleotide
  misc_feature 1..20: note = Target: ANGPTL3; (+) strand; PAM type: YTN; PAM sequence: TTA
  source 1..20: mol_type = other DNA
ttcctgtctttttctacaaa

SEQ ID NO: 15635 - DNA, 20 bp, synthetic construct
  misc_feature 1..20: note = Description of Artificial Sequence: Synthetic oligonucleotide
  misc_feature 1..20: note = Target: ANGPTL3; (+) strand; PAM type: YTN; PAM sequence: TTC
  source 1..20: mol_type = other DNA
ctgtctttttctacaaagaa

SEQ ID NO: 15636 - DNA, 20 bp, synthetic construct
  misc_feature 1..20: note = Description of Artificial Sequence: Synthetic oligonucleotide
  misc_feature 1..20: note = Target: ANGPTL3; (+) strand; PAM type: YTN; PAM sequence: CTG
  source 1..20: mol_type = other DNA
tctttttctacaaagaaagc

SEQ ID NO: 15637 - DNA, 20 bp, synthetic construct
  misc_feature 1..20: note = Description of Artificial Sequence: Synthetic oligonucleotide
  misc_feature 1..20: note = Target: ANGPTL3; (+) strand; PAM type: YTN; PAM sequence: CTT
  source 1..20: mol_type = other DNA
tttctacaaagaaagcatac

SEQ ID NO: 15638 - DNA, 20 bp, synthetic construct
  misc_feature 1..20: note = Description of Artificial Sequence: Synthetic oligonucleotide
  misc_feature 1..20: note = Target: ANGPTL3; (+) strand; PAM type: YTN; PAM sequence: TTT
  source 1..20: mol_type = other DNA
ttctacaaagaaagcataca

SEQ ID NO: 15639 - DNA, 20 bp, synthetic construct
  misc_feature 1..20: note = Description of Artificial Sequence: Synthetic oligonucleotide
  misc_feature 1..20: note = Target: ANGPTL3; (+) strand; PAM type: YTN; PAM sequence: TTT
  source 1..20: mol_type = other DNA
tctacaaagaaagcatacat

SEQ ID NO: 15640 - DNA, 20 bp, synthetic construct
  misc_feature 1..20: note = Description of Artificial Sequence: Synthetic oligonucleotide
  misc_feature 1..20: note = Target: ANGPTL3; (+) strand; PAM type: YTN; PAM sequence: TTT
  source 1..20: mol_type = other DNA
ctacaaagaaagcatacatt

SEQ ID NO: 15641 - DNA, 20 bp, synthetic construct
  misc_feature 1..20: note = Description of Artificial Sequence: Synthetic oligonucleotide
  misc_feature 1..20: note = Target: ANGPTL3; (+) strand; PAM type: YTN; PAM sequence: TTC
  source 1..20: mol_type = other DNA
tacaaagaaagcatacatta

SEQ ID NO: 15642 - DNA, 20 bp, synthetic construct
  misc_feature 1..20: note = Description of Artificial Sequence: Synthetic oligonucleotide
  misc_feature 1..20: note = Target: ANGPTL3; (+) strand; PAM type: YTN; PAM sequence: CTA
  source 1..20: mol_type = other DNA
caaagaaagcatacattaag

SEQ ID NO: 15643 - DNA, 20 bp, synthetic construct
  misc_feature 1..20: note = Description of Artificial Sequence: Synthetic oligonucleotide
  misc_feature 1..20: note = Target: ANGPTL3; (+) strand; PAM type: YTN; PAM sequence: TTA
  source 1..20: mol_type = other DNA
agcaaataccaaaggccagg

SEQ ID NO: 15644 - DNA, 20 bp, synthetic construct
  misc_feature 1..20: note = Description of Artificial Sequence: Synthetic oligonucleotide
  misc_feature 1..20: note = Target: ANGPTL3; (+) strand; PAM type: YTN; PAM sequence: TTT
  source 1..20: mol_type = other DNA
acatttgaagaaagtgacat

SEQ ID NO: 15645 - DNA, 20 bp, synthetic construct
  misc_feature 1..20: note = Description of Artificial Sequence: Synthetic oligonucleotide
  misc_feature 1..20: note = Target: ANGPTL3; (+) strand; PAM type: YTN; PAM sequence: TTA
  source 1..20: mol_type = other DNA
catttgaagaaagtgacatt

SEQ ID NO: 15646 - DNA, 20 bp, synthetic construct
  misc_feature 1..20: note = Description of Artificial Sequence: Synthetic oligonucleotide
  misc_feature 1..20: note = Target: ANGPTL3; (+) strand; PAM type: YTN; PAM sequence: TTT
  source 1..20: mol_type = other DNA
gaagaaagtgacattattat

SEQ ID NO: 15647 - DNA, 20 bp, synthetic construct
  misc_feature 1..20: note = Description of Artificial Sequence: Synthetic oligonucleotide
  misc_feature 1..20: note = Target: ANGPTL3; (+) strand; PAM type: YTN; PAM sequence: TTG
  source 1..20: mol_type = other DNA
aagaaagtgacattattatt

SEQ ID NO: 15648 - DNA, 20 bp, synthetic construct
  misc_feature 1..20: note = Description of Artificial Sequence: Synthetic oligonucleotide
  misc_feature 1..20: note = Target: ANGPTL3; (+) strand; PAM type: YTN; PAM sequence: TTA
  source 1..20: mol_type = other DNA
ttattactcaagtctctagg

SEQ ID NO: 15649 - DNA, 20 bp, synthetic construct
  misc_feature 1..20: note = Description of Artificial Sequence: Synthetic oligonucleotide
  misc_feature 1..20: note = Target: ANGPTL3; (+) strand; PAM type: YTN; PAM sequence: TTA
  source 1..20: mol_type = other DNA
ttactcaagtctctaggaat

SEQ ID NO: 15650 - DNA, 20 bp, synthetic construct
  misc_feature 1..20: note = Description of Artificial Sequence: Synthetic oligonucleotide
  misc_feature 1..20: note = Target: ANGPTL3; (+) strand; PAM type: YTN; PAM sequence: TTA
  source 1..20: mol_type = other DNA
ctcaagtctctaggaatact

SEQ ID NO: 15651 - DNA, 20 bp, synthetic construct
  misc_feature 1..20: note = Description of Artificial Sequence: Synthetic oligonucleotide
  misc_feature 1..20: note = Target: ANGPTL3; (+) strand; PAM type: YTN; PAM sequence: CTC
  source 1..20: mol_type = other DNA
aagtctctaggaatacttaa

SEQ ID NO: 15652 - DNA, 20 bp, synthetic construct
  misc_feature 1..20: note = Description of Artificial Sequence: Synthetic oligonucleotide
  misc_feature 1..20: note = Target: ANGPTL3; (+) strand; PAM type: YTN; PAM sequence: CTC
  source 1..20: mol_type = other DNA
taggaatacttaacacatct

SEQ ID NO: 15653 - DNA, 20 bp, synthetic construct
  misc_feature 1..20: note = Description of Artificial Sequence: Synthetic oligonucleotide
  misc_feature 1..20: note = Target: ANGPTL3; (+) strand; PAM type: YTN; PAM sequence: CTA
  source 1..20: mol_type = other DNA
ggaatacttaacacatctct

SEQ ID NO: 15654 - DNA, 20 bp, synthetic construct
  misc_feature 1..20: note = Description of Artificial Sequence: Synthetic oligonucleotide
  misc_feature 1..20: note = Target: ANGPTL3; (+) strand; PAM type: YTN; PAM sequence: CTT
  source 1..20: mol_type = other DNA
aacacatctcttgactgtat

SEQ ID NO: 15655 - DNA, 20 bp, synthetic construct
  misc_feature 1..20: note = Description of Artificial Sequence: Synthetic oligonucleotide
  misc_feature 1..20: note = Target: ANGPTL3; (+) strand; PAM type: YTN; PAM sequence: TTA
  source 1..20: mol_type = other DNA
acacatctcttgactgtata

SEQ ID NO: 15656 - DNA, 20 bp, synthetic construct
  misc_feature 1..20: note = Description of Artificial Sequence: Synthetic oligonucleotide
  misc_feature 1..20: note = Target: ANGPTL3; (+) strand; PAM type: YTN; PAM sequence: CTC
  source 1..20: mol_type = other DNA
ttgactgtatatggatgtta

SEQ ID NO: 15657 - DNA, 20 bp, synthetic construct
  misc_feature 1..20: note = Description of Artificial Sequence: Synthetic oligonucleotide
  misc_feature 1..20: note = Target: ANGPTL3; (+) strand; PAM type: YTN; PAM sequence: CTT
  source 1..20: mol_type = other DNA
gactgtatatggatgttaat

SEQ ID NO: 15658 - DNA, 20 bp, synthetic construct
  misc_feature 1..20: note = Description of Artificial Sequence: Synthetic oligonucleotide
  misc_feature 1..20: note = Target: ANGPTL3; (+) strand; PAM type: YTN; PAM sequence: TTG
  source 1..20: mol_type = other DNA
actgtatatggatgttaata

SEQ ID NO: 15659 - DNA, 20 bp, synthetic construct
  misc_feature 1..20: note = Description of Artificial Sequence: Synthetic oligonucleotide
  misc_feature 1..20: note = Target: ANGPTL3; (+) strand; PAM type: YTN; PAM sequence: CTG
  source 1..20: mol_type = other DNA
tatatggatgttaataaata

SEQ ID NO: 15660 - DNA, 20 bp, synthetic construct
  misc_feature 1..20: note = Description of Artificial Sequence: Synthetic oligonucleotide
  misc_feature 1..20: note = Target: ANGPTL3; (+) strand; PAM type: YTN; PAM sequence: TTA
  source 1..20: mol_type = other DNA
ataaatagctgacagtaaag

SEQ ID NO: 15661 - DNA, 20 bp, synthetic construct
  misc_feature 1..20: note = Description of Artificial Sequence: Synthetic oligonucleotide
  misc_feature 1..20: note = Target: ANGPTL3; (+) strand; PAM type: YTN; PAM sequence: CTG
  source 1..20: mol_type = other DNA
acagtaaagtttatccatat

SEQ ID NO: 15662 - DNA, 20 bp, synthetic construct
  misc_feature 1..20: note = Description of Artificial Sequence: Synthetic oligonucleotide
  misc_feature 1..20: note = Target: ANGPTL3; (+) strand; PAM type: YTN; PAM sequence: TTT
  source 1..20: mol_type = other DNA
atccatataaagacttgcaa

SEQ ID NO: 15663 - DNA, 20 bp, synthetic construct
  misc_feature 1..20: note = Description of Artificial Sequence: Synthetic oligonucleotide
  misc_feature 1..20: note = Target: ANGPTL3; (+) strand; PAM type: YTN; PAM sequence: TTA
  source 1..20: mol_type = other DNA
tccatataaagacttgcaaa

SEQ ID NO: 15664 - DNA, 20 bp, synthetic construct
  misc_feature 1..20: note = Description of Artificial Sequence: Synthetic oligonucleotide
  misc_feature 1..20: note = Target: ANGPTL3; (+) strand; PAM type: YTN; PAM sequence: CTT
  source 1..20: mol_type = other DNA
gcaaatattcctctaccaat

SEQ ID NO: 15665 - DNA, 20 bp, synthetic construct
  misc_feature 1..20: note = Description of Artificial Sequence: Synthetic oligonucleotide
  misc_feature 1..20: note = Target: ANGPTL3; (+) strand; PAM type: YTN; PAM sequence: TTG
  source 1..20: mol_type = other DNA
caaatattcctctaccaatg

SEQ ID NO: 15666 - DNA, 20 bp, synthetic construct
  misc_feature 1..20: note = Description of Artificial Sequence: Synthetic oligonucleotide
  misc_feature 1..20: note = Target: ANGPTL3; (+) strand; PAM type: YTN; PAM sequence: TTC
  source 1..20: mol_type = other DNA
ctctaccaatgacgagactt

SEQ ID NO: 15667 - DNA, 20 bp, synthetic construct
  misc_feature 1..20: note = Description of Artificial Sequence: Synthetic oligonucleotide
  misc_feature 1..20: note = Target: ANGPTL3; (+) strand; PAM type: YTN; PAM sequence: CTC
  source 1..20: mol_type = other DNA
taccaatgacgagactttaa

SEQ ID NO: 15668 - DNA, 20 bp, synthetic construct
  misc_feature 1..20: note = Description of Artificial Sequence: Synthetic oligonucleotide
  misc_feature 1..20: note = Target: ANGPTL3; (+) strand; PAM type: YTN; PAM sequence: CTA
  source 1..20: mol_type = other DNA
ccaatgacgagactttaaaa

SEQ ID NO: 15669 - DNA, 20 bp, synthetic construct
  misc_feature 1..20: note = Description of Artificial Sequence: Synthetic oligonucleotide
  misc_feature 1..20: note = Target: ANGPTL3; (+) strand; PAM type: YTN; PAM sequence: CTT
  source 1..20: mol_type = other DNA
taaaatatctataataatgt

SEQ ID NO: 15670 - DNA, 20 bp, synthetic construct
  misc_feature 1..20: note = Description of Artificial Sequence: Synthetic oligonucleotide
  misc_feature 1..20: note = Target: ANGPTL3; (+) strand; PAM type: YTN; PAM sequence: TTT
  source 1..20: mol_type = other DNA
aaaatatctataataatgta

SEQ ID NO: 15671 - DNA, 20 bp, synthetic construct
  misc_feature 1..20: note = Description of Artificial Sequence: Synthetic oligonucleotide
  misc_feature 1..20: note = Target: ANGPTL3; (+) strand; PAM type: YTN; PAM sequence: TTA
  source 1..20: mol_type = other DNA
aaatatctataataatgtaa

SEQ ID NO: 15672 - DNA, 20 bp, synthetic construct
  misc_feature 1..20: note = Description of Artificial Sequence: Synthetic oligonucleotide
  misc_feature 1..20: note = Target: ANGPTL3; (+) strand; PAM type: YTN; PAM sequence: CTA
  source 1..20: mol_type = other DNA
taataatgtaacacatttca

SEQ ID NO: 15673 - DNA, 20 bp, synthetic construct
  misc_feature 1..20: note = Description of Artificial Sequence: Synthetic oligonucleotide
  misc_feature 1..20: note = Target: ANGPTL3; (+) strand; PAM type: YTN; PAM sequence: TTT
  source 1..20: mol_type = other DNA
cactggtgaaacatgtcttg

SEQ ID NO: 15674 - DNA, 20 bp, synthetic construct
  misc_feature 1..20: note = Description of Artificial Sequence: Synthetic oligonucleotide
  misc_feature 1..20: note = Target: ANGPTL3; (+) strand; PAM type: YTN; PAM sequence: TTC
  source 1..20: mol_type = other DNA
actggtgaaacatgtcttgt

SEQ ID NO: 15675 - DNA, 20 bp, synthetic construct
  misc_feature 1..20: note = Description of Artificial Sequence: Synthetic oligonucleotide
  misc_feature 1..20: note = Target: ANGPTL3; (+) strand; PAM type: YTN; PAM sequence: CTG
  source 1..20: mol_type = other DNA
gtgaaacatgtcttgtcata

SEQ ID NO: 15676 - DNA, 20 bp, synthetic construct
  misc_feature 1..20: note = Description of Artificial Sequence: Synthetic oligonucleotide
  misc_feature 1..20: note = Target: ANGPTL3; (+) strand; PAM type: YTN; PAM sequence: CTT
  source 1..20: mol_type = other DNA
gtcatatgcattatagaaag

SEQ ID NO: 15677 - DNA, 20 bp, synthetic construct
  misc_feature 1..20: note = Description of Artificial Sequence: Synthetic oligonucleotide
  misc_feature 1..20: note = Target: ANGPTL3; (+) strand; PAM type: YTN; PAM sequence: TTG
  source 1..20: mol_type = other DNA
tcatatgcattatagaaagg

SEQ ID NO: 15678 - DNA, 20 bp, synthetic construct
  misc_feature 1..20: note = Description of Artificial Sequence: Synthetic oligonucleotide
  misc_feature 1..20: note = Target: ANGPTL3; (+) strand; PAM type: YTN; PAM sequence: TTA
  source 1..20: mol_type = other DNA
tagaaaggataatcagactt

SEQ ID NO: 15679 - DNA, 20 bp, synthetic construct
  misc_feature 1..20: note = Description of Artificial Sequence: Synthetic oligonucleotide
  misc_feature 1..20: note = Target: ANGPTL3; (+) strand; PAM type: YTN; PAM sequence: CTT
  source 1..20: mol_type = other DNA
tcagttatattaatattttt

SEQ ID NO: 15680 - DNA, 20 bp, synthetic construct
  misc_feature 1..20: note = Description of Artificial Sequence: Synthetic oligonucleotide
  misc_feature 1..20: note = Target: ANGPTL3; (+) strand; PAM type: YTN; PAM sequence: TTT
  source 1..20: mol_type = other DNA
cagttatattaatattttta

SEQ ID NO: 15681 - DNA, 20 bp, synthetic construct
  misc_feature 1..20: note = Description of Artificial Sequence: Synthetic oligonucleotide
  misc_feature 1..20: note = Target: ANGPTL3; (+) strand; PAM type: YTN; PAM sequence: TTC
  source 1..20: mol_type = other DNA
agttatattaatatttttaa

SEQ ID NO: 15682 - DNA, 20 bp, synthetic construct
  misc_feature 1..20: note = Description of Artificial Sequence: Synthetic oligonucleotide
  misc_feature 1..20: note = Target: ANGPTL3; (+) strand; PAM type: YTN; PAM sequence: TTA
  source 1..20: mol_type = other DNA
tattaatatttttaacattt

SEQ ID NO: 15683 - DNA, 20 bp, synthetic construct
  misc_feature 1..20: note = Description of Artificial Sequence: Synthetic oligonucleotide
  misc_feature 1..20: note = Target: ANGPTL3; (+) strand; PAM type: YTN; PAM sequence: TTA
  source 1..20: mol_type = other DNA
atatttttaacatttttgtg

SEQ ID NO: 15684 - DNA, 20 bp, synthetic construct
  misc_feature 1..20: note = Description of Artificial Sequence: Synthetic oligonucleotide
  misc_feature 1..20: note = Target: ANGPTL3; (+) strand; PAM type: YTN; PAM sequence: TTT
  source 1..20: mol_type = other DNA
ttaacatttttgtgcacata

SEQ ID NO: 15685 - DNA, 20 bp, synthetic construct
  misc_feature 1..20: note = Description of Artificial Sequence: Synthetic oligonucleotide
  misc_feature 1..20: note = Target: ANGPTL3; (+) strand; PAM type: YTN; PAM sequence: TTT
  source 1..20: mol_type = other DNA
taacatttttgtgcacatag

SEQ ID NO: 15686 - DNA, 20 bp, synthetic construct
  misc_feature 1..20: note = Description of Artificial Sequence: Synthetic oligonucleotide
  misc_feature 1..20: note = Target: ANGPTL3; (+) strand; PAM type: YTN; PAM sequence: TTT
  source 1..20: mol_type = other DNA
aacatttttgtgcacatagc

SEQ ID NO: 15687 - DNA, 20 bp, synthetic construct
  misc_feature 1..20: note = Description of Artificial Sequence: Synthetic oligonucleotide
  misc_feature 1..20: note = Target: ANGPTL3; (+) strand; PAM type: YTN; PAM sequence: TTA
  source 1..20: mol_type = other DNA
acatttttgtgcacatagct

SEQ ID NO: 15688 - DNA, 20 bp, synthetic construct
  misc_feature 1..20: note = Description of Artificial Sequence: Synthetic oligonucleotide
  misc_feature 1..20: note = Target: ANGPTL3; (+) strand; PAM type: YTN; PAM sequence: TTT
  source 1..20: mol_type = other DNA
ttgtgcacatagctatcttc

SEQ ID NO: 15689 - DNA, 20 bp, synthetic construct
  misc_feature 1..20: note = Description of Artificial Sequence: Synthetic oligonucleotide
  misc_feature 1..20: note = Target: ANGPTL3; (+) strand; PAM type: YTN; PAM sequence: TTT
  source 1..20: mol_type = other DNA
tgtgcacatagctatcttca

SEQ ID NO: 15690 - DNA, 20 bp, synthetic construct
  misc_feature 1..20: note = Description of Artificial Sequence: Synthetic oligonucleotide
  misc_feature 1..20: note = Target: ANGPTL3; (+) strand; PAM type: YTN; PAM sequence: TTT
  source 1..20: mol_type = other DNA
gtgcacatagctatcttcaa

SEQ ID NO: 15691 - DNA, 20 bp, synthetic construct
  misc_feature 1..20: note = Description of Artificial Sequence: Synthetic oligonucleotide
  misc_feature 1..20: note = Target: ANGPTL3; (+) strand; PAM type: YTN; PAM sequence: TTG
  source 1..20: mol_type = other DNA
tgcacatagctatcttcaat

SEQ ID NO: 15692 - DNA, 20 bp, synthetic construct
  misc_feature 1..20: note = Description of Artificial Sequence: Synthetic oligonucleotide
  misc_feature 1..20: note = Target: ANGPTL3; (+) strand; PAM type: YTN; PAM sequence: CTA
  source 1..20: mol_type = other DNA
tcttcaataaaattgtttta

SEQ ID NO: 15693 - DNA, 20 bp, synthetic construct
  misc_feature 1..20: note = Description of Artificial Sequence: Synthetic oligonucleotide
  misc_feature 1..20: note = Target: ANGPTL3; (+) strand; PAM type: YTN; PAM sequence: CTT
  source 1..20: mol_type = other DNA
caataaaattgttttaaaag

SEQ ID NO: 15694 - DNA, 20 bp, synthetic construct
  misc_feature 1..20: note = Description of Artificial Sequence: Synthetic oligonucleotide
  misc_feature 1..20: note = Target: ANGPTL3; (+) strand; PAM type: YTN; PAM sequence: TTC
  source 1..20: mol_type = other DNA
aataaaattgttttaaaagg

SEQ ID NO: 15695 - DNA, 20 bp, synthetic construct
  misc_feature 1..20: note = Description of Artificial Sequence: Synthetic oligonucleotide
  misc_feature 1..20: note = Target: ANGPTL3; (+) strand; PAM type: YTN; PAM sequence: TTG
  source 1..20: mol_type = other DNA
ttttaaaaggtattatttta

SEQ ID NO: 15696 - DNA, 20 bp, synthetic construct
  misc_feature 1..20: note = Description of Artificial Sequence: Synthetic oligonucleotide
  misc_feature 1..20: note = Target: ANGPTL3; (+) strand; PAM type: YTN; PAM sequence: TTT
  source 1..20: mol_type = other DNA
taaaaggtattattttaaga

SEQ ID NO: 15697 - DNA, 20 bp, synthetic construct
  misc_feature 1..20: note = Description of Artificial Sequence: Synthetic oligonucleotide
  misc_feature 1..20: note = Target: ANGPTL3; (+) strand; PAM type: YTN; PAM sequence: TTT
  source 1..20: mol_type = other DNA
aaaaggtattattttaagat

SEQ ID NO: 15698 - DNA, 20 bp, synthetic construct
  misc_feature 1..20: note = Description of Artificial Sequence: Synthetic oligonucleotide
  misc_feature 1..20: note = Target: ANGPTL3; (+) strand; PAM type: YTN; PAM sequence: TTA
  source 1..20: mol_type = other DNA
aaaggtattattttaagata

SEQ ID NO: 15699 - DNA, 20 bp, synthetic construct
  misc_feature 1..20: note = Description of Artificial Sequence: Synthetic oligonucleotide
  misc_feature 1..20: note = Target: ANGPTL3; (+) strand; PAM type: YTN; PAM sequence: TTA
  source 1..20: mol_type = other DNA
ttttaagatacactaaaatg

SEQ ID NO: 15700 - DNA, 20 bp, synthetic construct
  misc_feature 1..20: note = Description of Artificial Sequence: Synthetic oligonucleotide
  misc_feature 1..20: note = Target: ANGPTL3; (+) strand; PAM type: YTN; PAM sequence: TTT
  source 1..20: mol_type = other DNA
taagatacactaaaatgatc

SEQ ID NO: 15701 - DNA, 20 bp, synthetic construct
  misc_feature 1..20: note = Description of Artificial Sequence: Synthetic oligonucleotide
  misc_feature 1..20: note = Target: ANGPTL3; (+) strand; PAM type: YTN; PAM sequence: TTT
  source 1..20: mol_type = other DNA
aagatacactaaaatgatca

SEQ ID NO: 15702 - DNA, 20 bp, synthetic construct
  misc_feature 1..20: note = Description of Artificial Sequence: Synthetic oligonucleotide
  misc_feature 1..20: note = Target: ANGPTL3; (+) strand; PAM type: YTN; PAM sequence: TTA
  source 1..20: mol_type = other DNA
agatacactaaaatgatcaa

SEQ ID NO: 15703 - DNA, 20 bp, synthetic construct
  misc_feature 1..20: note = Description of Artificial Sequence: Synthetic oligonucleotide
  misc_feature 1..20: note = Target: ANGPTL3; (+) strand; PAM type: YTN; PAM sequence: CTA
  source 1..20: mol_type = other DNA
aaatgatcaagggattcaag

SEQ ID NO: 15704 - DNA, 20 bp, synthetic construct
  misc_feature 1..20: note = Description of Artificial Sequence: Synthetic oligonucleotide
  misc_feature 1..20: note = Target: ANGPTL3; (+) strand; PAM type: YTN; PAM sequence: TTC
  source 1..20: mol_type = other DNA
aagactaaacaactcaatta

SEQ ID NO: 15705 - DNA, 20 bp, synthetic construct
  misc_feature 1..20: note = Description of Artificial Sequence: Synthetic oligonucleotide
  misc_feature 1..20: note = Target: ANGPTL3; (+) strand; PAM type: YTN; PAM sequence: CTA
  source 1..20: mol_type = other DNA
aacaactcaattagttgcac

SEQ ID NO: 15706 - DNA, 20 bp, synthetic construct
  misc_feature 1..20: note = Description of Artificial Sequence: Synthetic oligonucleotide
  misc_feature 1..20: note = Target: ANGPTL3; (+) strand; PAM type: YTN; PAM sequence: CTC
  source 1..20: mol_type = other DNA
aattagttgcaccaataaaa

SEQ ID NO: 15707 - DNA, 20 bp, synthetic construct
  misc_feature 1..20: note = Description of Artificial Sequence: Synthetic oligonucleotide
  misc_feature 1..20: note = Target: ANGPTL3; (+) strand; PAM type: YTN; PAM sequence: TTA
  source 1..20: mol_type = other DNA
gttgcaccaataaaaaacac

SEQ ID NO: 15708 - DNA, 20 bp, synthetic construct
  misc_feature 1..20: note = Description of Artificial Sequence: Synthetic oligonucleotide
  misc_feature 1..20: note = Target: ANGPTL3; (+) strand; PAM type: YTN; PAM sequence: TTG
  source 1..20: mol_type = other DNA
caccaataaaaaacacttaa

SEQ ID NO: 15709 - DNA, 20 bp, synthetic construct
  misc_feature 1..20: note = Description of Artificial Sequence: Synthetic oligonucleotide
  misc_feature 1..20: note = Target: ANGPTL3; (+) strand; PAM type: YTN; PAM sequence: CTT
  source 1..20: mol_type = other DNA
aaaaaaactgtcagtgtcca

SEQ ID NO: 15710 - DNA, 20 bp, synthetic construct
  misc_feature 1..20: note = Description of Artificial Sequence: Synthetic oligonucleotide
  misc_feature 1..20: note = Target: ANGPTL3; (+) strand; PAM type: YTN; PAM sequence: TTA
  source 1..20: mol_type = other DNA
aaaaaactgtcagtgtccaa

SEQ ID NO: 15711 - DNA, 20 bp, synthetic construct
  misc_feature 1..20: note = Description of Artificial Sequence: Synthetic oligonucleotide
  misc_feature 1..20: note = Target: ANGPTL3; (+) strand; PAM type: YTN; PAM sequence: CTG
  source 1..20: mol_type = other DNA
tcagtgtccaacctgtactt

SEQ ID NO: 15712 - DNA, 20 bp, synthetic construct
  misc_feature 1..20: note = Description of Artificial Sequence: Synthetic oligonucleotide
  misc_feature 1..20: note = Target: ANGPTL3; (+) strand; PAM type: YTN; PAM sequence: CTG
  source 1..20: mol_type = other DNA
tacttaataactcacagatt

SEQ ID NO: 15713 - DNA, 20 bp, synthetic construct
  misc_feature 1..20: note = Description of Artificial Sequence: Synthetic oligonucleotide
  misc_feature 1..20: note = Target: ANGPTL3; (+) strand; PAM type: YTN; PAM sequence: CTT
  source 1..20: mol_type = other DNA
aataactcacagatttttaa

SEQ ID NO: 15714 - DNA, 20 bp, synthetic construct
  misc_feature 1..20: note = Description of Artificial Sequence: Synthetic oligonucleotide
  misc_feature 1..20: note = Target: ANGPTL3; (+) strand; PAM type: YTN; PAM sequence: TTA
  source 1..20: mol_type = other DNA
ataactcacagatttttaaa

SEQ ID NO: 15715 - DNA, 20 bp, synthetic construct
  misc_feature 1..20: note = Description of Artificial Sequence: Synthetic oligonucleotide
  misc_feature 1..20: note = Target: ANGPTL3; (+) strand; PAM type: YTN; PAM sequence: CTC
  source 1..20: mol_type = other DNA
acagatttttaaaacttttc

SEQ ID NO: 15716 - DNA, 20 bp, synthetic construct
  misc_feature 1..20: note = Description of Artificial Sequence: Synthetic oligonucleotide
  misc_feature 1..20: note = Target: ANGPTL3; (+) strand; PAM type: YTN; PAM sequence: TTT
  source 1..20: mol_type = other DNA
ttaaaacttttcttttcagg

SEQ ID NO: 15717 - DNA, 20 bp, synthetic construct
  misc_feature 1..20: note = Description of Artificial Sequence: Synthetic oligonucleotide
  misc_feature 1..20: note = Target: ANGPTL3; (+) strand; PAM type: YTN; PAM sequence: TTT
  source 1..20: mol_type = other DNA
taaaacttttcttttcagga

SEQ ID NO: 15718 - DNA, 20 bp, synthetic construct
  misc_feature 1..20: note = Description of Artificial Sequence: Synthetic oligonucleotide
  misc_feature 1..20: note = Target: ANGPTL3; (+) strand; PAM type: YTN; PAM sequence: TTT
  source 1..20: mol_type = other DNA
aaaacttttcttttcaggag

SEQ ID NO: 15719 - DNA, 20 bp, synthetic construct
  misc_feature 1..20: note = Description of Artificial Sequence: Synthetic oligonucleotide
  misc_feature 1..20: note = Target: ANGPTL3; (+) strand; PAM type: YTN; PAM sequence: TTA
  source 1..20: mol_type = other DNA
aaacttttcttttcaggaga

SEQ ID NO: 15720 - DNA, 20 bp, synthetic construct
  misc_feature 1..20: note = Description of Artificial Sequence: Synthetic oligonucleotide
  misc_feature 1..20: note = Target: ANGPTL3; (+) strand; PAM type: YTN; PAM sequence: CTT
  source 1..20: mol_type = other DNA
ttcttttcaggagaattttg

SEQ ID NO: 15721 - DNA, 20 bp, synthetic construct
  misc_feature 1..20: note = Description of Artificial Sequence: Synthetic oligonucleotide
  misc_feature 1..20: note = Target: ANGPTL3; (+) strand; PAM type: YTN; PAM sequence: TTT
  source 1..20: mol_type = other DNA
tcttttcaggagaattttgg

SEQ ID NO: 15722 - DNA, 20 bp, synthetic construct
  misc_feature 1..20: note = Description of Artificial Sequence: Synthetic oligonucleotide
  misc_feature 1..20: note = Target: ANGPTL3; (+) strand; PAM type: YTN; PAM sequence: TTT
  source 1..20: mol_type = other DNA
cttttcaggagaattttggt

SEQ ID NO: 15723 - DNA, 20 bp, synthetic construct
  misc_feature 1..20: note = Description of Artificial Sequence: Synthetic oligonucleotide
  misc_feature 1..20: note = Target: ANGPTL3; (+) strand; PAM type: YTN; PAM sequence: TTC
  source 1..20: mol_type = other DNA
ttttcaggagaattttggtt

SEQ ID NO: 15724 - DNA, 20 bp, synthetic construct
  misc_feature 1..20: note = Description of Artificial Sequence: Synthetic oligonucleotide
  misc_feature 1..20: note = Target: ANGPTL3; (+) strand; PAM type: YTN; PAM sequence: CTT
  source 1..20: mol_type = other DNA
ttcaggagaattttggttgg

SEQ ID NO: 15725 - DNA, 20 bp, synthetic construct
  misc_feature 1..20: note = Description of Artificial Sequence: Synthetic oligonucleotide
  misc_feature 1..20: note = Target: ANGPTL3; (+) strand; PAM type: YTN; PAM sequence: TTT
  source 1..20: mol_type = other DNA
tcaggagaattttggttggg

SEQ ID NO: 15726 - DNA, 20 bp, synthetic construct
  misc_feature 1..20: note = Description of Artificial Sequence: Synthetic oligonucleotide
  misc_feature 1..20: note = Target: ANGPTL3; (+) strand; PAM type: YTN; PAM sequence: TTT
  source 1..20: mol_type = other DNA
caggagaattttggttgggc

SEQ ID NO: 15727 - DNA, 20 bp, synthetic construct
  misc_feature 1..20: note = Description of Artificial Sequence: Synthetic oligonucleotide
  misc_feature 1..20: note = Target: ANGPTL3; (+) strand; PAM type: YTN; PAM sequence: TTC
  source 1..20: mol_type = other DNA
aggagaattttggttgggcc

SEQ ID NO: 15728 - DNA, 20 bp, synthetic construct
  misc_feature 1..20: note = Description of Artificial Sequence: Synthetic oligonucleotide
  misc_feature 1..20: note = Target: ANGPTL3; (+) strand; PAM type: YTN; PAM sequence: TTT
  source 1..20: mol_type = other DNA
tggttgggcctagagaagat

SEQ ID NO: 15729 - DNA, 20 bp, synthetic construct
  misc_feature 1..20: note = Description of Artificial Sequence: Synthetic oligonucleotide
  misc_feature 1..20: note = Target: ANGPTL3; (+) strand; PAM type: YTN; PAM sequence: TTT
  source 1..20: mol_type = other DNA
ggttgggcctagagaagata

SEQ ID NO: 15730 - DNA, 20 bp, synthetic construct
  misc_feature 1..20: note = Description of Artificial Sequence: Synthetic oligonucleotide
  misc_feature 1..20: note = Target: ANGPTL3; (+) strand; PAM type: YTN; PAM sequence: TTG
  source 1..20: mol_type = other DNA
gttgggcctagagaagatat

SEQ ID NO: 15731 - DNA, 20 bp, synthetic construct
  misc_feature 1..20: note = Description of Artificial Sequence: Synthetic oligonucleotide
  misc_feature 1..20: note = Target: ANGPTL3; (+) strand; PAM type: YTN; PAM sequence: TTG
  source 1..20: mol_type = other DNA
ggcctagagaagatatactc

SEQ ID NO: 15732 - DNA, 20 bp, synthetic construct
  misc_feature 1..20: note = Description of Artificial Sequence: Synthetic oligonucleotide
  misc_feature 1..20: note = Target: ANGPTL3; (+) strand; PAM type: YTN; PAM sequence: CTA
  source 1..20: mol_type = other DNA
gagaagatatactccatagt

SEQ ID NO: 15733 - DNA, 20 bp, synthetic construct
  misc_feature 1..20: note = Description of Artificial Sequence: Synthetic oligonucleotide
  misc_feature 1..20: note = Target: ANGPTL3; (+) strand; PAM type: YTN; PAM sequence: CTC
  source 1..20: mol_type = other DNA
catagtgaagcaatctaatt

SEQ ID NO: 15734 - DNA, 20 bp, synthetic construct
  misc_feature 1..20: note = Description of Artificial Sequence: Synthetic oligonucleotide
  misc_feature 1..20: note = Target: ANGPTL3; (+) strand; PAM type: YTN; PAM sequence: CTA
  source 1..20: mol_type = other DNA
attatgttttacgaattgag

SEQ ID NO: 15735 - DNA, 20 bp, synthetic construct
  misc_feature 1..20: note = Description of Artificial Sequence: Synthetic oligonucleotide
  misc_feature 1..20: note = Target: ANGPTL3; (+) strand; PAM type: YTN; PAM sequence: TTA
  source 1..20: mol_type = other DNA
tgttttacgaattgagttgg

SEQ ID NO: 15736 - DNA, 20 bp, synthetic construct
  misc_feature 1..20: note = Description of Artificial Sequence: Synthetic oligonucleotide
  misc_feature 1..20: note = Target: ANGPTL3; (+) strand; PAM type: YTN; PAM sequence: TTT
  source 1..20: mol_type = other DNA
tacgaattgagttggaagac

SEQ ID NO: 15737 - DNA, 20 bp, synthetic construct
  misc_feature 1..20: note = Description of Artificial Sequence: Synthetic oligonucleotide
  misc_feature 1..20: note = Target: ANGPTL3; (+) strand; PAM type: YTN; PAM sequence: TTT
  source 1..20: mol_type = other DNA
acgaattgagttggaagact

SEQ ID NO: 15738 - DNA, 20 bp, synthetic construct
  misc_feature 1..20: note = Description of Artificial Sequence: Synthetic oligonucleotide
  misc_feature 1..20: note = Target: ANGPTL3; (+) strand; PAM type: YTN; PAM sequence: TTA
  source 1..20: mol_type = other DNA
cgaattgagttggaagactg

SEQ ID NO: 15739 - DNA, 20 bp, synthetic construct
  misc_feature 1..20: note = Description of Artificial Sequence: Synthetic oligonucleotide
  misc_feature 1..20: note = Target: ANGPTL3; (+) strand; PAM type: YTN; PAM sequence: TTG
  source 1..20: mol_type = other DNA
agttggaagactggaaagac

SEQ ID NO: 15740 - DNA, 20 bp, synthetic construct
  misc_feature 1..20: note = Description of Artificial Sequence: Synthetic oligonucleotide
  misc_feature 1..20: note = Target: ANGPTL3; (+) strand; PAM type: YTN; PAM sequence: TTG
  source 1..20: mol_type = other DNA
gaagactggaaagacaacaa

SEQ ID NO: 15741 - DNA, 20 bp, synthetic construct
  misc_feature 1..20: note = Description of Artificial Sequence: Synthetic oligonucleotide
  misc_feature 1..20: note = Target: ANGPTL3; (+) strand; PAM type: YTN; PAM sequence: CTG
  source 1..20: mol_type = other DNA
gaaagacaacaaacattata

SEQ ID NO: 15742 - DNA, 20 bp, synthetic construct
  misc_feature 1..20: note = Description of Artificial Sequence: Synthetic oligonucleotide
  misc_feature 1..20: note = Target: ANGPTL3; (+) strand; PAM type: YTN; PAM sequence: TTA
  source 1..20: mol_type = other DNA
tattgaatattctttttact

SEQ ID NO: 15743 - DNA, 20 bp, synthetic construct
  misc_feature 1..20: note = Description of Artificial Sequence: Synthetic oligonucleotide
  misc_feature 1..20: note = Target: ANGPTL3; (+) strand; PAM type: YTN; PAM sequence: TTG
  source 1..20: mol_type = other DNA
aatattctttttacttggga

SEQ ID NO: 15744 - DNA, 20 bp, synthetic construct
  misc_feature 1..20: note = Description of Artificial Sequence: Synthetic oligonucleotide
  misc_feature 1..20: note = Target: ANGPTL3; (+) strand; PAM type: YTN; PAM sequence: TTC
  source 1..20: mol_type = other DNA
tttttacttgggaaatcacg

SEQ ID NO: 15745 - DNA, 20 bp, synthetic construct
  misc_feature 1..20: note = Description of Artificial Sequence: Synthetic oligonucleotide
  misc_feature 1..20: note = Target: ANGPTL3; (+) strand; PAM type: YTN; PAM sequence: CTT
  source 1..20: mol_type = other DNA
tttacttgggaaatcacgaa

SEQ ID NO: 15746 - DNA, 20 bp, synthetic construct
  misc_feature 1..20: note = Description of Artificial Sequence: Synthetic oligonucleotide
  misc_feature 1..20: note = Target: ANGPTL3; (+) strand; PAM type: YTN; PAM sequence: TTT
  source 1..20: mol_type = other DNA
ttacttgggaaatcacgaaa

SEQ ID NO: 15747 - DNA, 20 bp, synthetic construct
  misc_feature 1..20: note = Description of Artificial Sequence: Synthetic oligonucleotide
  misc_feature 1..20: note = Target: ANGPTL3; (+) strand; PAM type: YTN; PAM sequence: TTT
  source 1..20: mol_type = other DNA
tacttgggaaatcacgaaac

SEQ ID NO: 15748 - DNA, 20 bp, synthetic construct
  misc_feature 1..20: note = Description of Artificial Sequence: Synthetic oligonucleotide
  misc_feature 1..20: note = Target: ANGPTL3; (+) strand; PAM type: YTN; PAM sequence: TTT
  source 1..20: mol_type = other DNA
acttgggaaatcacgaaacc

SEQ ID NO: 15749 - DNA, 20 bp, synthetic construct
  misc_feature 1..20: note = Description of Artificial Sequence: Synthetic oligonucleotide
  misc_feature 1..20: note = Target: ANGPTL3; (+) strand; PAM type: YTN; PAM sequence: TTA
  source 1..20: mol_type = other DNA
cttgggaaatcacgaaacca

SEQ ID NO: 15750 - DNA, 20 bp, synthetic construct
  misc_feature 1..20: note = Description of Artificial Sequence: Synthetic oligonucleotide
  misc_feature 1..20: note = Target: ANGPTL3; (+) strand; PAM type: YTN; PAM sequence: CTT
  source 1..20: mol_type = other DNA
gggaaatcacgaaaccaact

SEQ ID NO: 15751 - DNA, 20 bp, synthetic construct
  misc_feature 1..20: note = Description of Artificial Sequence: Synthetic oligonucleotide
  misc_feature 1..20: note = Target: ANGPTL3; (+) strand; PAM type: YTN; PAM sequence: TTG
  source 1..20: mol_type = other DNA
ggaaatcacgaaaccaacta

SEQ ID NO: 15752 - DNA, 20 bp, synthetic construct
  misc_feature 1..20: note = Description of Artificial Sequence: Synthetic oligonucleotide
  misc_feature 1..20: note = Target: ANGPTL3; (+) strand; PAM type: YTN; PAM sequence: CTA
  source 1..20: mol_type = other DNA
tacgctacatctagttgcga

SEQ ID NO: 15753 - DNA, 20 bp, synthetic construct
  misc_feature 1..20: note = Description of Artificial Sequence: Synthetic oligonucleotide
  misc_feature 1..20: note = Target: ANGPTL3; (+) strand; PAM type: YTN; PAM sequence: CTA
  source 1..20: mol_type = other DNA
catctagttgcgattactgg

SEQ ID NO: 15754 - DNA, 20 bp, synthetic construct
  misc_feature 1..20: note = Description of Artificial Sequence: Synthetic oligonucleotide
  misc_feature 1..20: note = Target: ANGPTL3; (+) strand; PAM type: YTN; PAM sequence: CTA
  source 1..20: mol_type = other DNA
gttgcgattactggcaatgt

SEQ ID NO: 15755 - DNA, 20 bp, synthetic construct
  misc_feature 1..20: note = Description of Artificial Sequence: Synthetic oligonucleotide
  misc_feature 1..20: note = Target: ANGPTL3; (+) strand; PAM type: YTN; PAM sequence: TTG
  source 1..20: mol_type = other DNA
cgattactggcaatgtcccc

SEQ ID NO: 15756 - DNA, 20 bp, synthetic construct
  misc_feature 1..20: note = Description of Artificial Sequence: Synthetic oligonucleotide
  misc_feature 1..20: note = Target: ANGPTL3; (+) strand; PAM type: YTN; PAM sequence: TTA
  source 1..20: mol_type = other DNA
ctggcaatgtccccaatgca

SEQ ID NO: 15757 - DNA, 20 bp, synthetic construct
  misc_feature 1..20: note = Description of Artificial Sequence: Synthetic oligonucleotide
  misc_feature 1..20: note = Target: ANGPTL3; (+) strand; PAM type: YTN; PAM sequence: CTG
  source 1..20: mol_type = other DNA
gcaatgtccccaatgcaatc

SEQ ID NO: 15758 - DNA, 20 bp, synthetic construct
  misc_feature 1..20: note = Description of Artificial Sequence: Synthetic oligonucleotide
  misc_feature 1..20: note = Target: ANGPTL3; (+) strand; PAM type: YTN; PAM sequence: TTT
  source 1..20: mol_type = other DNA
ggtgttttctacttgggatc

SEQ ID NO: 15759 - DNA, 20 bp, synthetic construct
  misc_feature 1..20: note = Description of Artificial Sequence: Synthetic oligonucleotide
  misc_feature 1..20: note = Target: ANGPTL3; (+) strand; PAM type: YTN; PAM sequence: TTG
  source 1..20: mol_type = other DNA
gtgttttctacttgggatca

SEQ ID NO: 15760 - DNA, 20 bp, synthetic construct
  misc_feature 1..20: note = Description of Artificial Sequence: Synthetic oligonucleotide
  misc_feature 1..20: note = Target: ANGPTL3; (+) strand; PAM type: YTN; PAM sequence: TTT
  source 1..20: mol_type = other DNA
tctacttgggatcacaaagc

SEQ ID NO: 15761 - DNA, 20 bp, synthetic construct
  misc_feature 1..20: note = Description of Artificial Sequence: Synthetic oligonucleotide
  misc_feature 1..20: note = Target: ANGPTL3; (+) strand; PAM type: YTN; PAM sequence: TTT
  source 1..20: mol_type = other DNA
ctacttgggatcacaaagca

SEQ ID NO: 15762 - DNA, 20 bp, synthetic construct
  misc_feature 1..20: note = Description of Artificial Sequence: Synthetic oligonucleotide
  misc_feature 1..20: note = Target: ANGPTL3; (+) strand; PAM type: YTN; PAM sequence: TTC
  source 1..20: mol_type = other DNA
tacttgggatcacaaagcaa

SEQ ID NO: 15763 - DNA, 20 bp, synthetic construct
  misc_feature 1..20: note = Description of Artificial Sequence: Synthetic oligonucleotide
  misc_feature 1..20: note = Target: ANGPTL3; (+) strand; PAM type: YTN; PAM sequence: CTA
  source 1..20: mol_type = other DNA
cttgggatcacaaagcaaaa

SEQ ID NO: 15764 - DNA, 20 bp, synthetic construct
  misc_feature 1..20: note = Description of Artificial Sequence: Synthetic oligonucleotide
  misc_feature 1..20: note = Target: ANGPTL3; (+) strand; PAM type: YTN; PAM sequence: CTT
  source 1..20: mol_type = other DNA
gggatcacaaagcaaaagga

SEQ ID NO: 15765 - DNA, 20 bp, synthetic construct
  misc_feature 1..20: note = Description of Artificial Sequence: Synthetic oligonucleotide
  misc_feature 1..20: note = Target: ANGPTL3; (+) strand; PAM type: YTN; PAM sequence: TTG
  source 1..20: mol_type = other DNA
ggatcacaaagcaaaaggac

SEQ ID NO: 15766 - DNA, 20 bp, synthetic construct
  misc_feature 1..20: note = Description of Artificial Sequence: Synthetic oligonucleotide
  misc_feature 1..20: note = Target: ANGPTL3; (+) strand; PAM type: YTN; PAM sequence: CTT
  source 1..20: mol_type = other DNA
caactgtccagagggttatt

SEQ ID NO: 15767 - DNA, 20 bp, synthetic construct
  misc_feature 1..20: note = Description of Artificial Sequence: Synthetic oligonucleotide
  misc_feature 1..20: note = Target: ANGPTL3; (+) strand; PAM type: YTN; PAM sequence: TTC
  source 1..20: mol_type = other DNA
aactgtccagagggttattc

SEQ ID NO: 15768 - DNA, 20 bp, synthetic construct
  misc_feature 1..20: note = Description of Artificial Sequence: Synthetic oligonucleotide
  misc_feature 1..20: note = Target: ANGPTL3; (+) strand; PAM type: YTN; PAM sequence: CTG
  source 1..20: mol_type = other DNA
tccagagggttattcaggta

SEQ ID NO: 15769 - DNA, 20 bp, synthetic construct
  misc_feature 1..20: note = Description of Artificial Sequence: Synthetic oligonucleotide
  misc_feature 1..20: note = Target: ANGPTL3; (+) strand; PAM type: YTN; PAM sequence: TTA
  source 1..20: mol_type = other DNA
ttcaggtatctttttctgat

SEQ ID NO: 15770 - DNA, 20 bp, synthetic construct
  misc_feature 1..20: note = Description of Artificial Sequence: Synthetic oligonucleotide
  misc_feature 1..20: note = Target: ANGPTL3; (+) strand; PAM type: YTN; PAM sequence: TTC
  source 1..20: mol_type = other DNA
aggtatctttttctgatacc

SEQ ID NO: 15771 - DNA, 20 bp, synthetic construct
  misc_feature 1..20: note = Description of Artificial Sequence: Synthetic oligonucleotide
  misc_feature 1..20: note = Target: ANGPTL3; (+) strand; PAM type: YTN; PAM sequence: CTT
  source 1..20: mol_type = other DNA
tttctgataccaatacttta

SEQ ID NO: 15772 - DNA, 20 bp, synthetic construct
  misc_feature 1..20: note = Description of Artificial Sequence: Synthetic oligonucleotide
  misc_feature 1..20: note = Target: ANGPTL3; (+) strand; PAM type: YTN; PAM sequence: TTT
  source 1..20: mol_type = other DNA
ttctgataccaatactttat

SEQ ID NO: 15773 - DNA, 20 bp, synthetic construct
  misc_feature 1..20: note = Description of Artificial Sequence: Synthetic oligonucleotide
  misc_feature 1..20: note = Target: ANGPTL3; (+) strand; PAM type: YTN; PAM sequence: TTT
  source 1..20: mol_type = other DNA
tctgataccaatactttatt

SEQ ID NO: 15774 - DNA, 20 bp, synthetic construct
  misc_feature 1..20: note = Description of Artificial Sequence: Synthetic oligonucleotide
  misc_feature 1..20: note = Target: ANGPTL3; (+) strand; PAM type: YTN; PAM sequence: TTT
  source 1..20: mol_type = other DNA
ctgataccaatactttattt

SEQ ID NO: 15775 - DNA, 20 bp, synthetic construct
  misc_feature 1..20: note = Description of Artificial Sequence: Synthetic oligonucleotide
  misc_feature 1..20: note = Target: ANGPTL3; (+) strand; PAM type: YTN; PAM sequence: TTC
  source 1..20: mol_type = other DNA
tgataccaatactttatttt

SEQ ID NO: 15776 - DNA, 20 bp, synthetic construct
  misc_feature 1..20: note = Description of Artificial Sequence: Synthetic oligonucleotide
  misc_feature 1..20: note = Target: ANGPTL3; (+) strand; PAM type: YTN; PAM sequence: CTG
  source 1..20: mol_type = other DNA
ataccaatactttattttca

SEQ ID NO: 15777 - DNA, 20 bp, synthetic construct
  misc_feature 1..20: note = Description of Artificial Sequence: Synthetic oligonucleotide
  misc_feature 1..20: note = Target: ANGPTL3; (+) strand; PAM type: YTN; PAM sequence: CTT
  source 1..20: mol_type = other DNA
tattttcatatcttcaaagt

SEQ ID NO: 15778 - DNA, 20 bp, synthetic construct
  misc_feature 1..20: note = Description of Artificial Sequence: Synthetic oligonucleotide
  misc_feature 1..20: note = Target: ANGPTL3; (+) strand; PAM type: YTN; PAM sequence: TTT
  source 1..20: mol_type = other DNA
attttcatatcttcaaagta

SEQ ID NO: 15779 - DNA, 20 bp, synthetic construct
  misc_feature 1..20: note = Description of Artificial Sequence: Synthetic oligonucleotide
  misc_feature 1..20: note = Target: ANGPTL3; (+) strand; PAM type: YTN; PAM sequence: TTA
  source 1..20: mol_type = other DNA
ttttcatatcttcaaagtat

SEQ ID NO: 15780 - DNA, 20 bp, synthetic construct
  misc_feature 1..20: note = Description of Artificial Sequence: Synthetic oligonucleotide
  misc_feature 1..20: note = Target: ANGPTL3; (+) strand; PAM type: YTN; PAM sequence: TTT
  source 1..20: mol_type = other DNA
tcatatcttcaaagtatctt

SEQ ID NO: 15781 - DNA, 20 bp, synthetic construct
  misc_feature 1..20: note = Description of Artificial Sequence: Synthetic oligonucleotide
  misc_feature 1..20: note = Target: ANGPTL3; (+) strand; PAM type: YTN; PAM sequence: TTT
  source 1..20: mol_type = other DNA
catatcttcaaagtatcttc

SEQ ID NO: 15782 - DNA, 20 bp, synthetic construct
  misc_feature 1..20: note = Description of Artificial Sequence: Synthetic oligonucleotide
  misc_feature 1..20: note = Target: ANGPTL3; (+) strand; PAM type: YTN; PAM sequence: TTC
  source 1..20: mol_type = other DNA
atatcttcaaagtatcttcc

SEQ ID NO: 15783 - DNA, 20 bp, synthetic construct
  misc_feature 1..20: note = Description of Artificial Sequence: Synthetic oligonucleotide
  misc_feature 1..20: note = Target: ANGPTL3; (+) strand; PAM type: YTN; PAM sequence: CTT
  source 1..20: mol_type = other DNA
caaagtatcttcccacatta

SEQ ID NO: 15784 - DNA, 20 bp, synthetic construct
  misc_feature 1..20: note = Description of Artificial Sequence: Synthetic oligonucleotide
  misc_feature 1..20: note = Target: ANGPTL3; (+) strand; PAM type: YTN; PAM sequence: TTC
  source 1..20: mol_type = other DNA
aaagtatcttcccacattat

SEQ ID NO: 15785 - DNA, 20 bp, synthetic construct
  misc_feature 1..20: note = Description of Artificial Sequence: Synthetic oligonucleotide
  misc_feature 1..20: note = Target: ANGPTL3; (+) strand; PAM type: YTN; PAM sequence: CTT
  source 1..20: mol_type = other DNA
cccacattattagctattat

SEQ ID NO: 15786 - DNA, 20 bp, synthetic construct
  misc_feature 1..20: note = Description of Artificial Sequence: Synthetic oligonucleotide
  misc_feature 1..20: note = Target: ANGPTL3; (+) strand; PAM type: YTN; PAM sequence: TTC
  source 1..20: mol_type = other DNA
ccacattattagctattatc

SEQ ID NO: 15787 - DNA, 20 bp, synthetic construct
  misc_feature 1..20: note = Description of Artificial Sequence: Synthetic oligonucleotide
  misc_feature 1..20: note = Target: ANGPTL3; (+) strand; PAM type: YTN; PAM sequence: TTA
  source 1..20: mol_type = other DNA
ttagctattatctgcaatga

SEQ ID NO: 15788 - DNA, 20 bp, synthetic construct
  misc_feature 1..20: note = Description of Artificial Sequence: Synthetic oligonucleotide
  misc_feature 1..20: note = Target: ANGPTL3; (+) strand; PAM type: YTN; PAM sequence: TTA
  source 1..20: mol_type = other DNA
gctattatctgcaatgacaa

SEQ ID NO: 15789 - DNA, 20 bp, synthetic construct
  misc_feature 1..20: note = Description of Artificial Sequence: Synthetic oligonucleotide
  misc_feature 1..20: note = Target: ANGPTL3; (+) strand; PAM type: YTN; PAM sequence: CTA
  source 1..20: mol_type = other DNA
ttatctgcaatgacaacttt

SEQ ID NO: 15790 - DNA, 20 bp, synthetic construct
  misc_feature 1..20: note = Description of Artificial Sequence: Synthetic oligonucleotide
  misc_feature 1..20: note = Target: ANGPTL3; (+) strand; PAM type: YTN; PAM sequence: TTA
  source 1..20: mol_type = other DNA
tctgcaatgacaacttttaa

SEQ ID NO: 15791 - DNA, 20 bp, synthetic construct
  misc_feature 1..20: note = Description of Artificial Sequence: Synthetic oligonucleotide
  misc_feature 1..20: note = Target: ANGPTL3; (+) strand; PAM type: YTN; PAM sequence: CTG
  source 1..20: mol_type = other DNA
caatgacaacttttaaaaat

SEQ ID NO: 15792 - DNA, 20 bp, synthetic construct
  misc_feature 1..20: note = Description of Artificial Sequence: Synthetic oligonucleotide
  misc_feature 1..20: note = Target: ANGPTL3; (+) strand; PAM type: YTN; PAM sequence: CTT
  source 1..20: mol_type = other DNA
ttaaaaatccgaatcccaaa

SEQ ID NO: 15793 - DNA, 20 bp, synthetic construct
  misc_feature 1..20: note = Description of Artificial Sequence: Synthetic oligonucleotide
  misc_feature 1..20: note = Target: ANGPTL3; (+) strand; PAM type: YTN; PAM sequence: TTT
  source 1..20: mol_type = other DNA
taaaaatccgaatcccaaat

SEQ ID NO: 15794 - DNA, 20 bp, synthetic construct
  misc_feature 1..20: note = Description of Artificial Sequence: Synthetic oligonucleotide
  misc_feature 1..20: note = Target: ANGPTL3; (+) strand; PAM type: YTN; PAM sequence: TTT
  source 1..20: mol_type = other DNA
aaaaatccgaatcccaaata

SEQ ID NO: 15795 - DNA, 20 bp, synthetic construct
  misc_feature 1..20: note = Description of Artificial Sequence: Synthetic oligonucleotide
  misc_feature 1..20: note = Target: ANGPTL3; (+) strand; PAM type: YTN; PAM sequence: TTA
  source 1..20: mol_type = other DNA
aaaatccgaatcccaaataa

SEQ ID NO: 15796 - DNA, 20 bp, synthetic construct
  misc_feature 1..20: note = Description of Artificial Sequence: Synthetic oligonucleotide
  misc_feature 1..20: note = Target: ANGPTL3; (+) strand; PAM type: YTN; PAM sequence: TTT
  source 1..20: mol_type = other DNA
tctctctagacgaaaacctc

SEQ ID NO: 15797 - DNA, 20 bp, synthetic construct
  misc_feature 1..20: note = Description of Artificial Sequence: Synthetic oligonucleotide
  misc_feature 1..20: note = Target: ANGPTL3; (+) strand; PAM type: YTN; PAM sequence: TTT
  source 1..20: mol_type = other DNA
ctctctagacgaaaacctct

SEQ ID NO: 15798 - DNA, 20 bp, synthetic construct
  misc_feature 1..20: note = Description of Artificial Sequence: Synthetic oligonucleotide
  misc_feature 1..20: note = Target: ANGPTL3; (+) strand; PAM type: YTN; PAM sequence: TTC
  source 1..20: mol_type = other DNA
tctctagacgaaaacctctt

SEQ ID NO: 15799 - DNA, 20 bp, synthetic construct
  misc_feature 1..20: note = Description of Artificial Sequence: Synthetic oligonucleotide
  misc_feature 1..20: note = Target: ANGPTL3; (+) strand; PAM type: YTN; PAM sequence: CTC
  source 1..20: mol_type = other DNA
tctagacgaaaacctcttaa

SEQ ID NO: 15800 - DNA, 20 bp, synthetic construct
  misc_feature 1..20: note = Description of Artificial Sequence: Synthetic oligonucleotide
  misc_feature 1..20: note = Target: ANGPTL3; (+) strand; PAM type: YTN; PAM sequence: CTC
  source 1..20: mol_type = other DNA
tagacgaaaacctcttaact

SEQ ID NO: 15801 - DNA, 20 bp, synthetic construct
  misc_feature 1..20: note = Description of Artificial Sequence: Synthetic oligonucleotide
  misc_feature 1..20: note = Target: ANGPTL3; (+) strand; PAM type: YTN; PAM sequence: CTA
  source 1..20: mol_type = other DNA
gacgaaaacctcttaactat

SEQ ID NO: 15802 - DNA, 20 bp, synthetic construct
  misc_feature 1..20: note = Description of Artificial Sequence: Synthetic oligonucleotide
  misc_feature 1..20: note = Target: ANGPTL3; (+) strand; PAM type: YTN; PAM sequence: CTC
  source 1..20: mol_type = other DNA
ttaactataatgaaagtgtt

SEQ ID NO: 15803 - DNA, 20 bp, synthetic construct
  misc_feature 1..20: note = Description of Artificial Sequence: Synthetic oligonucleotide
  misc_feature 1..20: note = Target: ANGPTL3; (+) strand; PAM type: YTN; PAM sequence: CTT
  source 1..20: mol_type = other DNA
aactataatgaaagtgttca

SEQ ID NO: 15804 - DNA, 20 bp, synthetic construct
  misc_feature 1..20: note = Description of Artificial Sequence: Synthetic oligonucleotide
  misc_feature 1..20: note = Target: ANGPTL3; (+) strand; PAM type: YTN; PAM sequence: TTA
  source 1..20: mol_type = other DNA
actataatgaaagtgttcat

SEQ ID NO: 15805 - DNA, 20 bp, synthetic construct
  misc_feature 1..20: note = Description of Artificial Sequence: Synthetic oligonucleotide
  misc_feature 1..20: note = Target: ANGPTL3; (+) strand; PAM type: YTN; PAM sequence: CTA
  source 1..20: mol_type = other DNA
taatgaaagtgttcattcta

SEQ ID NO: 15806 - DNA, 20 bp, synthetic construct
  misc_feature 1..20: note = Description of Artificial Sequence: Synthetic oligonucleotide
  misc_feature 1..20: note = Target: ANGPTL3; (+) strand; PAM type: YTN; PAM sequence: TTC
  source 1..20: mol_type = other DNA
attctagttcaatcaggtat

SEQ ID NO: 15807 - DNA, 20 bp, synthetic construct
  misc_feature 1..20: note = Description of Artificial Sequence: Synthetic oligonucleotide
  misc_feature 1..20: note = Target: ANGPTL3; (+) strand; PAM type: YTN; PAM sequence: TTC
  source 1..20: mol_type = other DNA
tagttcaatcaggtatttta

SEQ ID NO: 15808 - DNA, 20 bp, synthetic construct
  misc_feature 1..20: note = Description of Artificial Sequence: Synthetic oligonucleotide
  misc_feature 1..20: note = Target: ANGPTL3; (+) strand; PAM type: YTN; PAM sequence: CTA
  source 1..20: mol_type = other DNA
gttcaatcaggtattttacc

SEQ ID NO: 15809 - DNA, 20 bp, synthetic construct
  misc_feature 1..20: note = Description of Artificial Sequence: Synthetic oligonucleotide
  misc_feature 1..20: note = Target: ANGPTL3; (+) strand; PAM type: YTN; PAM sequence: TTC
  source 1..20: mol_type = other DNA
aatcaggtattttacctcta

SEQ ID NO: 15810 - DNA, 20 bp, synthetic construct
  misc_feature 1..20: note = Description of Artificial Sequence: Synthetic oligonucleotide
  misc_feature 1..20: note = Target: ANGPTL3; (+) strand; PAM type: YTN; PAM sequence: TTT
  source 1..20: mol_type = other DNA
tacctctaatcttcctcaga

SEQ ID NO: 15811 - DNA, 20 bp, synthetic construct
  misc_feature 1..20: note = Description of Artificial Sequence: Synthetic oligonucleotide
  misc_feature 1..20: note = Target: ANGPTL3; (+) strand; PAM type: YTN; PAM sequence: TTT
  source 1..20: mol_type = other DNA
acctctaatcttcctcagat

SEQ ID NO: 15812 - DNA, 20 bp, synthetic construct
  misc_feature 1..20: note = Description of Artificial Sequence: Synthetic oligonucleotide
  misc_feature 1..20: note = Target: ANGPTL3; (+) strand; PAM type: YTN; PAM sequence: TTA
  source 1..20: mol_type = other DNA
cctctaatcttcctcagatt

SEQ ID NO: 15813 - DNA, 20 bp, synthetic construct
  misc_feature 1..20: note = Description of Artificial Sequence: Synthetic oligonucleotide
  misc_feature 1..20: note = Target: ANGPTL3; (+) strand; PAM type: YTN; PAM sequence: CTC
  source 1..20: mol_type = other DNA
taatcttcctcagattttct

SEQ ID NO: 15814 - DNA, 20 bp, synthetic construct
  misc_feature 1..20: note = Description of Artificial Sequence: Synthetic oligonucleotide
  misc_feature 1..20: note = Target: ANGPTL3; (+) strand; PAM type: YTN; PAM sequence: CTA
  source 1..20: mol_type = other DNA
atcttcctcagattttctat

SEQ ID NO: 15815 - DNA, 20 bp, synthetic construct
  misc_feature 1..20: note = Description of Artificial Sequence: Synthetic oligonucleotide
  misc_feature 1..20: note = Target: ANGPTL3; (+) strand; PAM type: YTN; PAM sequence: CTT
  source 1..20: mol_type = other DNA
cctcagattttctatttttt

SEQ ID NO: 15816 - DNA, 20 bp, synthetic construct
  misc_feature 1..20: note = Description of Artificial Sequence: Synthetic oligonucleotide
  misc_feature 1..20: note = Target: ANGPTL3; (+) strand; PAM type: YTN; PAM sequence: TTC
  source 1..20: mol_type = other DNA
ctcagattttctattttttg

SEQ ID NO: 15817 - DNA, 20 bp, synthetic construct
  misc_feature 1..20: note = Description of Artificial Sequence: Synthetic oligonucleotide
  misc_feature 1..20: note = Target: ANGPTL3; (+) strand; PAM type: YTN; PAM sequence: CTC
  source 1..20: mol_type = other DNA
agattttctattttttggta

SEQ ID NO: 15818 - DNA, 20 bp, synthetic construct
  misc_feature 1..20: note = Description of Artificial Sequence: Synthetic oligonucleotide
  misc_feature 1..20: note = Target: ANGPTL3; (+) strand; PAM type: YTN; PAM sequence: TTT
  source 1..20: mol_type = other DNA
tctattttttggtagtgtat

SEQ ID NO: 15819 - DNA, 20 bp, synthetic construct
  misc_feature 1..20: note = Description of Artificial Sequence: Synthetic oligonucleotide
  misc_feature 1..20: note = Target: ANGPTL3; (+) strand; PAM type: YTN; PAM sequence: TTT
  source 1..20: mol_type = other DNA
ctattttttggtagtgtata

SEQ ID NO: 15820 - DNA, 20 bp, synthetic construct
  misc_feature 1..20: note = Description of Artificial Sequence: Synthetic oligonucleotide
  misc_feature 1..20: note = Target: ANGPTL3; (+) strand; PAM type: YTN; PAM sequence: TTC
  source 1..20: mol_type = other DNA
tattttttggtagtgtatag

SEQ ID NO: 15821 - DNA, 20 bp, synthetic construct
  misc_feature 1..20: note = Description of Artificial Sequence: Synthetic oligonucleotide
  misc_feature 1..20: note = Target: ANGPTL3; (+) strand; PAM type: YTN; PAM sequence: CTA
  source 1..20: mol_type = other DNA
ttttttggtagtgtatagat

SEQ ID NO: 15822 - DNA, 20 bp, synthetic construct
  misc_feature 1..20: note = Description of Artificial Sequence: Synthetic oligonucleotide
  misc_feature 1..20: note = Target: ANGPTL3; (+) strand; PAM type: YTN; PAM sequence: TTT
  source 1..20: mol_type = other DNA
tttggtagtgtatagattat

SEQ ID NO: 15823 - DNA, 20 bp, synthetic construct
  misc_feature 1..20: note = Description of Artificial Sequence: Synthetic oligonucleotide
  misc_feature 1..20: note = Target: ANGPTL3; (+) strand; PAM type: YTN; PAM sequence: TTT
  source 1..20: mol_type = other DNA
ttggtagtgtatagattatt

SEQ ID NO: 15824 - DNA, 20 bp, synthetic construct
  misc_feature 1..20: note = Description of Artificial Sequence: Synthetic oligonucleotide
  misc_feature 1..20: note = Target: ANGPTL3; (+) strand; PAM type: YTN; PAM sequence: TTT
  source 1..20: mol_type = other DNA
tggtagtgtatagattattt

SEQ ID NO: 15825 - DNA, 20 bp, synthetic construct
  misc_feature 1..20: note = Description of Artificial Sequence: Synthetic oligonucleotide
  misc_feature 1..20: note = Target: ANGPTL3; (+) strand; PAM type: YTN; PAM sequence: TTT
  source 1..20: mol_type = other DNA
ggtagtgtatagattattta

SEQ ID NO: 15826 - DNA, 20 bp, synthetic construct
  misc_feature 1..20: note = Description of Artificial Sequence: Synthetic oligonucleotide
  misc_feature 1..20: note = Target: ANGPTL3; (+) strand; PAM type: YTN; PAM sequence: TTG
  source 1..20: mol_type = other DNA
gtagtgtatagattatttat

SEQ ID NO: 15827 - DNA, 20 bp, synthetic construct
  misc_feature 1..20: note = Description of Artificial Sequence: Synthetic oligonucleotide
  misc_feature 1..20: note = Target: ANGPTL3; (+) strand; PAM type: YTN; PAM sequence: TTA
  source 1..20: mol_type = other DNA
tttatacagattatttaaaa

SEQ ID NO: 15828 - DNA, 20 bp, synthetic construct
  misc_feature 1..20: note = Description of Artificial Sequence: Synthetic oligonucleotide
  misc_feature 1..20: note = Target: ANGPTL3; (+) strand; PAM type: YTN; PAM sequence: TTT
  source 1..20: mol_type = other DNA
atacagattatttaaaattg

SEQ ID NO: 15829 - DNA, 20 bp, synthetic construct
  misc_feature 1..20: note = Description of Artificial Sequence: Synthetic oligonucleotide
  misc_feature 1..20: note = Target: ANGPTL3; (+) strand; PAM type: YTN; PAM sequence: TTA
  source 1..20: mol_type = other DNA
tacagattatttaaaattgg

SEQ ID NO: 15830 - DNA, 20 bp, synthetic construct
  misc_feature 1..20: note = Description of Artificial Sequence: Synthetic oligonucleotide
  misc_feature 1..20: note = Target: ANGPTL3; (+) strand; PAM type: YTN; PAM sequence: TTA
  source 1..20: mol_type = other DNA
tttaaaattgggacttatac

SEQ ID NO: 15831 - DNA, 20 bp, synthetic construct
  misc_feature 1..20: note = Description of Artificial Sequence: Synthetic oligonucleotide
  misc_feature 1..20: note = Target: ANGPTL3; (+) strand; PAM type: YTN; PAM sequence: TTT
  source 1..20: mol_type = other DNA
aaaattgggacttatacaga

SEQ ID NO: 15832 - DNA, 20 bp, synthetic construct
  misc_feature 1..20: note = Description of Artificial Sequence: Synthetic oligonucleotide
  misc_feature 1..20: note = Target: ANGPTL3; (+) strand; PAM type: YTN; PAM sequence: TTA
  source 1..20: mol_type = other DNA
aaattgggacttatacagat

SEQ ID NO: 15833 - DNA, 20 bp, synthetic construct
  misc_feature 1..20: note = Description of Artificial Sequence: Synthetic oligonucleotide
  misc_feature 1..20: note = Target: ANGPTL3; (+) strand; PAM type: YTN; PAM sequence: TTG
  source 1..20: mol_type = other DNA
ggacttatacagattattta

SEQ ID NO: 15834 - DNA, 20 bp, synthetic construct
  misc_feature 1..20: note = Description of Artificial Sequence: Synthetic oligonucleotide
  misc_feature 1..20: note = Target: ANGPTL3; (+) strand; PAM type: YTN; PAM sequence: CTT
  source 1..20: mol_type = other DNA
atacagattatttaaaactg

SEQ ID NO: 15835 - DNA, 20 bp, synthetic construct
  misc_feature 1..20: note = Description of Artificial Sequence: Synthetic oligonucleotide
  misc_feature 1..20: note = Target: ANGPTL3; (+) strand; PAM type: YTN; PAM sequence: TTA
  source 1..20: mol_type = other DNA
tacagattatttaaaactgg

SEQ ID NO: 15836 - DNA, 20 bp, synthetic construct
  misc_feature 1..20: note = Description of Artificial Sequence: Synthetic oligonucleotide
  misc_feature 1..20: note = Target: ANGPTL3; (+) strand; PAM type: YTN; PAM sequence: TTA
  source 1..20: mol_type = other DNA
tttaaaactgggatacatgc

SEQ ID NO: 15837 - DNA, 20 bp, synthetic construct
  misc_feature 1..20: note = Description of Artificial Sequence: Synthetic oligonucleotide
  misc_feature 1..20: note = Target: ANGPTL3; (+) strand; PAM type: YTN; PAM sequence: TTT
  source 1..20: mol_type = other DNA
aaaactgggatacatgcatc

SEQ ID NO: 15838 - DNA, 20 bp, synthetic construct
  misc_feature 1..20: note = Description of Artificial Sequence: Synthetic oligonucleotide
  misc_feature 1..20: note = Target: ANGPTL3; (+) strand; PAM type: YTN; PAM sequence: TTA
  source 1..20: mol_type = other DNA
aaactgggatacatgcatct

SEQ ID NO: 15839 - DNA, 20 bp, synthetic construct
  misc_feature 1..20: note = Description of Artificial Sequence: Synthetic oligonucleotide
  misc_feature 1..20: note = Target: ANGPTL3; (+) strand; PAM type: YTN; PAM sequence: CTG
  source 1..20: mol_type = other DNA
ggatacatgcatctaaaaca

SEQ ID NO: 15840 - DNA, 20 bp, synthetic construct
  misc_feature 1..20: note = Description of Artificial Sequence: Synthetic oligonucleotide
  misc_feature 1..20: note = Target: ANGPTL3; (+) strand; PAM type: YTN; PAM sequence: CTA
  source 1..20: mol_type = other DNA
aaacactgtaatatttataa

SEQ ID NO: 15841 - DNA, 20 bp, synthetic construct
  misc_feature 1..20: note = Description of Artificial Sequence: Synthetic oligonucleotide
  misc_feature 1..20: note = Target: ANGPTL3; (+) strand; PAM type: YTN; PAM sequence: CTG
  source 1..20: mol_type = other DNA
taatatttataagaaaggaa

SEQ ID NO: 15842 - DNA, 20 bp, synthetic construct
  misc_feature 1..20: note = Description of Artificial Sequence: Synthetic oligonucleotide
  misc_feature 1..20: note = Target: ANGPTL3; (+) strand; PAM type: YTN; PAM sequence: TTT
  source 1..20: mol_type = other DNA
ataagaaaggaagataaact

SEQ ID NO: 15843 - DNA, 20 bp, synthetic construct
  misc_feature 1..20: note = Description of Artificial Sequence: Synthetic oligonucleotide
  misc_feature 1..20: note = Target: ANGPTL3; (+) strand; PAM type: YTN; PAM sequence: TTA
  source 1..20: mol_type = other DNA
taagaaaggaagataaactt

SEQ ID NO: 15844 - DNA, 20 bp, synthetic construct
  misc_feature 1..20: note = Description of Artificial Sequence: Synthetic oligonucleotide
  misc_feature 1..20: note = Target: ANGPTL3; (+) strand; PAM type: YTN; PAM sequence: CTT
  source 1..20: mol_type = other DNA
acggggaaatacagtaacag

SEQ ID NO: 15845 - DNA, 20 bp, synthetic construct
  misc_feature 1..20: note = Description of Artificial Sequence: Synthetic oligonucleotide
  misc_feature 1..20: note = Target: ANGPTL3; (+) strand; PAM type: YTN; PAM sequence: TTA
  source 1..20: mol_type = other DNA
cggggaaatacagtaacagt

SEQ ID NO: 15846 - DNA, 20 bp, synthetic construct
  misc_feature 1..20: note = Description of Artificial Sequence: Synthetic oligonucleotide
  misc_feature 1..20: note = Target: ANGPTL3; (+) strand; PAM type: YTN; PAM sequence: CTA
  source 1..20: mol_type = other DNA
catacgagtctgtacccatt

SEQ ID NO: 15847 - DNA, 20 bp, synthetic construct
  misc_feature 1..20: note = Description of Artificial Sequence: Synthetic oligonucleotide
  misc_feature 1..20: note = Target: ANGPTL3; (+) strand; PAM type: YTN; PAM sequence: CTG
  source 1..20: mol_type = other DNA
tacccattaaattgcatatc

SEQ ID NO: 15848 - DNA, 20 bp, synthetic construct
  misc_feature 1..20: note = Description of Artificial Sequence: Synthetic oligonucleotide
  misc_feature 1..20: note = Target: ANGPTL3; (+) strand; PAM type: YTN; PAM sequence: TTA
  source 1..20: mol_type = other DNA
aattgcatatctatctcctt

SEQ ID NO: 15849 - DNA, 20 bp, synthetic construct
  misc_feature 1..20: note = Description of Artificial Sequence: Synthetic oligonucleotide
  misc_feature 1..20: note = Target: ANGPTL3; (+) strand; PAM type: YTN; PAM sequence: TTG
  source 1..20: mol_type = other DNA
catatctatctcctttagga

SEQ ID NO: 15850 - DNA, 20 bp, synthetic construct
  misc_feature 1..20: note = Description of Artificial Sequence: Synthetic oligonucleotide
  misc_feature 1..20: note = Target: ANGPTL3; (+) strand; PAM type: YTN; PAM sequence: CTA
  source 1..20: mol_type = other DNA
tctcctttaggaggctggtg

SEQ ID NO: 15851 - DNA, 20 bp, synthetic construct
  misc_feature 1..20: note = Description of Artificial Sequence: Synthetic oligonucleotide
  misc_feature 1..20: note = Target: ANGPTL3; (+) strand; PAM type: YTN; PAM sequence: CTC
  source 1..20: mol_type = other DNA
ctttaggaggctggtggtgg

SEQ ID NO: 15852 - DNA, 20 bp, synthetic construct
  misc_feature 1..20: note = Description of Artificial Sequence: Synthetic oligonucleotide
  misc_feature 1..20: note = Target: ANGPTL3; (+) strand; PAM type: YTN; PAM sequence: CTT
  source 1..20: mol_type = other DNA
taggaggctggtggtggcat

SEQ ID NO: 15853 - DNA, 20 bp, synthetic construct
  misc_feature 1..20: note = Description of Artificial Sequence: Synthetic oligonucleotide
  misc_feature 1..20: note = Target: ANGPTL3; (+) strand; PAM type: YTN; PAM sequence: TTT
  source 1..20: mol_type = other DNA
aggaggctggtggtggcatg

SEQ ID NO: 15854 - DNA, 20 bp, synthetic construct
  misc_feature 1..20: note = Description of Artificial Sequence: Synthetic oligonucleotide
  misc_feature 1..20: note = Target: ANGPTL3; (+) strand; PAM type: YTN; PAM sequence: TTA
  source 1..20: mol_type = other DNA
ggaggctggtggtggcatga

SEQ ID NO: 15855 - DNA, 20 bp, synthetic construct
  misc_feature 1..20: note = Description of Artificial Sequence: Synthetic oligonucleotide
  misc_feature 1..20: note = Target: ANGPTL3; (+) strand; PAM type: YTN; PAM sequence: CTG
  source 1..20: mol_type = other DNA
gtggtggcatgatgagtgtg

SEQ ID NO: 15856 - DNA, 20 bp, synthetic construct
  misc_feature 1..20: note = Description of Artificial Sequence: Synthetic oligonucleotide
  misc_feature 1..20: note = Target: ANGPTL3; (+) strand; PAM type: YTN; PAM sequence: CTA
  source 1..20: mol_type = other DNA
aatggtaaatataacaaacc

SEQ ID NO: 15857 - DNA, 20 bp, synthetic construct
  misc_feature 1..20: note = Description of Artificial Sequence: Synthetic oligonucleotide
  misc_feature 1..20: note = Target: ANGPTL3; (+) strand; PAM type: YTN; PAM sequence: CTA
  source 1..20: mol_type = other DNA
agccagagaggagaagagga

SEQ ID NO: 15858 - DNA, 20 bp, synthetic construct
  misc_feature 1..20: note = Description of Artificial Sequence: Synthetic oligonucleotide
  misc_feature 1..20: note = Target: ANGPTL3; (+) strand; PAM type: YTN; PAM sequence: TTA
  source 1..20: mol_type = other DNA
tcttggaagtctcaaaatgg

SEQ ID NO: 15859 - DNA, 20 bp, synthetic construct
  misc_feature 1..20: note = Description of Artificial Sequence: Synthetic oligonucleotide
  misc_feature 1..20: note = Target: ANGPTL3; (+) strand; PAM type: YTN; PAM sequence: CTT
  source 1..20: mol_type = other DNA
ggaagtctcaaaatggaagg

SEQ ID NO: 15860 - DNA, 20 bp, synthetic construct
  misc_feature 1..20: note = Description of Artificial Sequence: Synthetic oligonucleotide
  misc_feature 1..20: note = Target: ANGPTL3; (+) strand; PAM type: YTN; PAM sequence: TTG
  source 1..20: mol_type = other DNA
gaagtctcaaaatggaaggt

SEQ ID NO: 15861 - DNA, 20 bp, synthetic construct
  misc_feature 1..20: note = Description of Artificial Sequence: Synthetic oligonucleotide
  misc_feature 1..20: note = Target: ANGPTL3; (+) strand; PAM type: YTN; PAM sequence: CTC
  source 1..20: mol_type = other DNA
aaaatggaaggttatactct

SEQ ID NO: 15862 - DNA, 20 bp, synthetic construct
  misc_feature 1..20: note = Description of Artificial Sequence: Synthetic oligonucleotide
  misc_feature 1..20: note = Target: ANGPTL3; (+) strand; PAM type: YTN; PAM sequence: TTA
  source 1..20: mol_type = other DNA
tactctataaaatcaaccaa

SEQ ID NO: 15863 - DNA, 20 bp, synthetic construct
  misc_feature 1..20: note = Description of Artificial Sequence: Synthetic oligonucleotide
  misc_feature 1..20: note = Target: ANGPTL3; (+) strand; PAM type: YTN; PAM sequence: CTC
  source 1..20: mol_type = other DNA
tataaaatcaaccaaaatgt

SEQ ID NO: 15864 - DNA, 20 bp, synthetic construct
  misc_feature 1..20: note = Description of Artificial Sequence: Synthetic oligonucleotide
  misc_feature 1..20: note = Target: ANGPTL3; (+) strand; PAM type: YTN; PAM sequence: CTA
  source 1..20: mol_type = other DNA
taaaatcaaccaaaatgttg

SEQ ID NO: 15865 - DNA, 20 bp, synthetic construct
  misc_feature 1..20: note = Description of Artificial Sequence: Synthetic oligonucleotide
  misc_feature 1..20: note = Target: ANGPTL3; (+) strand; PAM type: YTN; PAM sequence: TTG
  source 1..20: mol_type = other DNA
atccatccaacagattcaga

SEQ ID NO: 15866 - DNA, 20 bp, synthetic construct
  misc_feature 1..20: note = Description of Artificial Sequence: Synthetic oligonucleotide
  misc_feature 1..20: note = Target: ANGPTL3; (+) strand; PAM type: YTN; PAM sequence: TTC
  source 1..20: mol_type = other DNA
agaaagctttgaatgaactg

SEQ ID NO: 15867 - DNA, 20 bp, synthetic construct
  misc_feature 1..20: note = Description of Artificial Sequence: Synthetic oligonucleotide
  misc_feature 1..20: note = Target: ANGPTL3; (+) strand; PAM type: YTN; PAM sequence: CTT
  source 1..20: mol_type = other DNA
tgaatgaactgaggcaaatt

SEQ ID NO: 15868 - DNA, 20 bp, synthetic construct
  misc_feature 1..20: note = Description of Artificial Sequence: Synthetic oligonucleotide
  misc_feature 1..20: note = Target: ANGPTL3; (+) strand; PAM type: YTN; PAM sequence: TTT
  source 1..20: mol_type = other DNA
gaatgaactgaggcaaattt

SEQ ID NO: 15869 - DNA, 20 bp, synthetic construct
  misc_feature 1..20: note = Description of Artificial Sequence: Synthetic oligonucleotide
  misc_feature 1..20: note = Target: ANGPTL3; (+) strand; PAM type: YTN; PAM sequence: TTG
  source 1..20: mol_type = other DNA
aatgaactgaggcaaattta

SEQ ID NO: 15870 - DNA, 20 bp, synthetic construct
  misc_feature 1..20: note = Description of Artificial Sequence: Synthetic oligonucleotide
  misc_feature 1..20: note = Target: ANGPTL3; (+) strand; PAM type: YTN; PAM sequence: CTG
  source 1..20: mol_type = other DNA
aggcaaatttaaaaggcaat

SEQ ID NO: 15871 - DNA, 20 bp, synthetic construct
  misc_feature 1..20: note = Description of Artificial Sequence: Synthetic oligonucleotide
  misc_feature 1..20: note = Target: ANGPTL3; (+) strand; PAM type: YTN; PAM sequence: TTT
  source 1..20: mol_type = other DNA
aaaaggcaataatttaaaca

SEQ ID NO: 15872 - DNA, 20 bp, synthetic construct
  misc_feature 1..20: note = Description of Artificial Sequence: Synthetic oligonucleotide
  misc_feature 1..20: note = Target: ANGPTL3; (+) strand; PAM type: YTN; PAM sequence: TTA
  source 1..20: mol_type = other DNA
aaaggcaataatttaaacat

SEQ ID NO: 15873 - DNA, 20 bp, synthetic construct
  misc_feature 1..20: note = Description of Artificial Sequence: Synthetic oligonucleotide
  misc_feature 1..20: note = Target: ANGPTL3; (+) strand; PAM type: YTN; PAM sequence: TTT
  source 1..20: mol_type = other DNA
aaacattaacctcattccaa

SEQ ID NO: 15874 - DNA, 20 bp, synthetic construct
  misc_feature 1..20: note = Description of Artificial Sequence: Synthetic oligonucleotide
  misc_feature 1..20: note = Target: ANGPTL3; (+) strand; PAM type: YTN; PAM sequence: TTA
  source 1..20: mol_type = other DNA
aacattaacctcattccaag

SEQ ID NO: 15875 - DNA, 20 bp, synthetic construct
  misc_feature 1..20: note = Description of Artificial Sequence: Synthetic oligonucleotide
  misc_feature 1..20: note = Target: ANGPTL3; (+) strand; PAM type: YTN; PAM sequence: TTA
  source 1..20: mol_type = other DNA
acctcattccaagttaatgt

SEQ ID NO: 15876 - DNA, 20 bp, synthetic construct
  misc_feature 1..20: note = Description of Artificial Sequence: Synthetic oligonucleotide
  misc_feature 1..20: note = Target: ANGPTL3; (+) strand; PAM type: YTN; PAM sequence: CTC
  source 1..20: mol_type = other DNA
attccaagttaatgtggtct

SEQ ID NO: 15877 - DNA, 20 bp, synthetic construct
  misc_feature 1..20: note = Description of Artificial Sequence: Synthetic oligonucleotide
  misc_feature 1..20: note = Target: ANGPTL3; (+) strand; PAM type: YTN; PAM sequence: TTC
  source 1..20: mol_type = other DNA
caagttaatgtggtctaata

SEQ ID NO: 15878 - DNA, 20 bp, synthetic construct
  misc_feature 1..20: note = Description of Artificial Sequence: Synthetic oligonucleotide
  misc_feature 1..20: note = Target: ANGPTL3; (+) strand; PAM type: YTN; PAM sequence: TTA
  source 1..20: mol_type = other DNA
atgtggtctaataatctggt

SEQ ID NO: 15879 - DNA, 20 bp, synthetic construct
  misc_feature 1..20: note = Description of Artificial Sequence: Synthetic oligonucleotide
  misc_feature 1..20: note = Target: ANGPTL3; (+) strand; PAM type: YTN; PAM sequence: CTA
  source 1..20: mol_type = other DNA
ataatctggtattaaatcct

SEQ ID NO: 15880 - DNA, 20 bp, synthetic construct
  misc_feature 1..20: note = Description of Artificial Sequence: Synthetic oligonucleotide
  misc_feature 1..20: note = Target: ANGPTL3; (+) strand; PAM type: YTN; PAM sequence: CTG
  source 1..20: mol_type = other DNA
gtattaaatccttaagagaa

SEQ ID NO: 15881 - DNA, 20 bp, synthetic construct
  misc_feature 1..20: note = Description of Artificial Sequence: Synthetic oligonucleotide
  misc_feature 1..20: note = Target: ANGPTL3; (+) strand; PAM type: YTN; PAM sequence: TTA
  source 1..20: mol_type = other DNA
aatccttaagagaaagcttg

SEQ ID NO: 15882 - DNA, 20 bp, synthetic construct
  misc_feature 1..20: note = Description of Artificial Sequence: Synthetic oligonucleotide
  misc_feature 1..20: note = Target: ANGPTL3; (+) strand; PAM type: YTN; PAM sequence: CTT
  source 1..20: mol_type = other DNA
aagagaaagcttgagaaata

SEQ ID NO: 15883 - DNA, 20 bp, synthetic construct
  misc_feature 1..20: note = Description of Artificial Sequence: Synthetic oligonucleotide
  misc_feature 1..20: note = Target: ANGPTL3; (+) strand; PAM type: YTN; PAM sequence: TTA
  source 1..20: mol_type = other DNA
agagaaagcttgagaaatag

SEQ ID NO: 15884 - DNA, 20 bp, synthetic construct
  misc_feature 1..20: note = Description of Artificial Sequence: Synthetic oligonucleotide
  misc_feature 1..20: note = Target: ANGPTL3; (+) strand; PAM type: YTN; PAM sequence: CTT
  source 1..20: mol_type = other DNA
gagaaatagattttttttat

SEQ ID NO: 15885 - DNA, 20 bp, synthetic construct
  misc_feature 1..20: note = Description of Artificial Sequence: Synthetic oligonucleotide
  misc_feature 1..20: note = Target: ANGPTL3; (+) strand; PAM type: YTN; PAM sequence: TTG
  source 1..20: mol_type = other DNA
agaaatagattttttttatc

SEQ ID NO: 15886 - DNA, 20 bp, synthetic construct
  misc_feature 1..20: note = Description of Artificial Sequence: Synthetic oligonucleotide
  misc_feature 1..20: note = Target: ANGPTL3; (+) strand; PAM type: YTN; PAM sequence: TTT
  source 1..20: mol_type = other DNA
tttttatcttaaagtcactg

SEQ ID NO: 15887 - DNA, 20 bp, synthetic construct
  misc_feature 1..20: note = Description of Artificial Sequence: Synthetic oligonucleotide
  misc_feature 1..20: note = Target: ANGPTL3; (+) strand; PAM type: YTN; PAM sequence: TTT
  source 1..20: mol_type = other DNA
ttttatcttaaagtcactgt

SEQ ID NO: 15888 - DNA, 20 bp, synthetic construct
  misc_feature 1..20: note = Description of Artificial Sequence: Synthetic oligonucleotide
  misc_feature 1..20: note = Target: ANGPTL3; (+) strand; PAM type: YTN; PAM sequence: TTT
  source 1..20: mol_type = other DNA
tttatcttaaagtcactgtc

SEQ ID NO: 15889 - DNA, 20 bp, synthetic construct
  misc_feature 1..20: note = Description of Artificial Sequence: Synthetic oligonucleotide
  misc_feature 1..20: note = Target: ANGPTL3; (+) strand; PAM type: YTN; PAM sequence: TTT
  source 1..20: mol_type = other DNA
ttatcttaaagtcactgtct

SEQ ID NO: 15890 - DNA, 20 bp, synthetic construct
  misc_feature 1..20: note = Description of Artificial Sequence: Synthetic oligonucleotide
  misc_feature 1..20: note = Target: ANGPTL3; (+) strand; PAM type: YTN; PAM sequence: TTT
  source 1..20: mol_type = other DNA
tatcttaaagtcactgtcta

SEQ ID NO: 15891 - DNA, 20 bp, synthetic construct
  misc_feature 1..20: note = Description of Artificial Sequence: Synthetic oligonucleotide
  misc_feature 1..20: note = Target: ANGPTL3; (+) strand; PAM type: YTN; PAM sequence: TTT
  source 1..20: mol_type = other DNA
atcttaaagtcactgtctat

SEQ ID NO: 15892 - DNA, 20 bp, synthetic construct
  misc_feature 1..20: note = Description of Artificial Sequence: Synthetic oligonucleotide
  misc_feature 1..20: note = Target: ANGPTL3; (+) strand; PAM type: YTN; PAM sequence: TTA
  source 1..20: mol_type = other DNA
tcttaaagtcactgtctatt

SEQ ID NO: 15893 - DNA, 20 bp, synthetic construct
  misc_feature 1..20: note = Description of Artificial Sequence: Synthetic oligonucleotide
  misc_feature 1..20: note = Target: ANGPTL3; (+) strand; PAM type: YTN; PAM sequence: CTT
  source 1..20: mol_type = other DNA
aaagtcactgtctatttaag

SEQ ID NO: 15894 - DNA, 20 bp, synthetic construct
  misc_feature 1..20: note = Description of Artificial Sequence: Synthetic oligonucleotide
  misc_feature 1..20: note = Target: ANGPTL3; (+) strand; PAM type: YTN; PAM sequence: TTA
  source 1..20: mol_type = other DNA
aagtcactgtctatttaaga

SEQ ID NO: 15895 - DNA, 20 bp, synthetic construct
  misc_feature 1..20: note = Description of Artificial Sequence: Synthetic oligonucleotide
  misc_feature 1..20: note = Target: ANGPTL3; (+) strand; PAM type: YTN; PAM sequence: CTG
  source 1..20: mol_type = other DNA
tctatttaagattaaacata

SEQ ID NO: 15896 - DNA, 20 bp, synthetic construct
  misc_feature 1..20: note = Description of Artificial Sequence: Synthetic oligonucleotide
  misc_feature 1..20: note = Target: ANGPTL3; (+) strand; PAM type: YTN; PAM sequence: CTA
  source 1..20: mol_type = other DNA
tttaagattaaacatacaat

SEQ ID NO: 15897 - DNA, 20 bp, synthetic construct
  misc_feature 1..20: note = Description of Artificial Sequence: Synthetic oligonucleotide
  misc_feature 1..20: note = Target: ANGPTL3; (+) strand; PAM type: YTN; PAM sequence: TTT
  source 1..20: mol_type = other DNA
aagattaaacatacaatcac

SEQ ID NO: 15898 - DNA, 20 bp, synthetic construct
  misc_feature 1..20: note = Description of Artificial Sequence: Synthetic oligonucleotide
  misc_feature 1..20: note = Target: ANGPTL3; (+) strand; PAM type: YTN; PAM sequence: TTA
  source 1..20: mol_type = other DNA
agattaaacatacaatcaca

SEQ ID NO: 15899 - DNA, 20 bp, synthetic construct
  misc_feature 1..20: note = Description of Artificial Sequence: Synthetic oligonucleotide
  misc_feature 1..20: note = Target: ANGPTL3; (+) strand; PAM type: YTN; PAM sequence: TTA
  source 1..20: mol_type = other DNA
aacatacaatcacataacct

SEQ ID NO: 15900 - DNA, 20 bp, synthetic construct
  misc_feature 1..20: note = Description of Artificial Sequence: Synthetic oligonucleotide
  misc_feature 1..20: note = Target: ANGPTL3; (+) strand; PAM type: YTN; PAM sequence: CTT
  source 1..20: mol_type = other DNA
aaagaataccgtttacattt

SEQ ID NO: 15901 - DNA, 20 bp, synthetic construct
  misc_feature 1..20: note = Description of Artificial Sequence: Synthetic oligonucleotide
  misc_feature 1..20: note = Target: ANGPTL3; (+) strand; PAM type: YTN; PAM sequence: TTA
  source 1..20: mol_type = other DNA
aagaataccgtttacatttc

SEQ ID NO: 15902 - DNA, 20 bp, synthetic construct
  misc_feature 1..20: note = Description of Artificial Sequence: Synthetic oligonucleotide
  misc_feature 1..20: note = Target: ANGPTL3; (+) strand; PAM type: YTN; PAM sequence: TTT
  source 1..20: mol_type = other DNA
acatttctcaatcaaaattc

SEQ ID NO: 15903 - DNA, 20 bp, synthetic construct
  misc_feature 1..20: note = Description of Artificial Sequence: Synthetic oligonucleotide
  misc_feature 1..20: note = Target: ANGPTL3; (+) strand; PAM type: YTN; PAM sequence: TTA
  source 1..20: mol_type = other DNA
catttctcaatcaaaattct

SEQ ID NO: 15904 - DNA, 20 bp, synthetic construct
  misc_feature 1..20: note = Description of Artificial Sequence: Synthetic oligonucleotide
  misc_feature 1..20: note = Target: ANGPTL3; (+) strand; PAM type: YTN; PAM sequence: TTT
  source 1..20: mol_type = other DNA
ctcaatcaaaattcttataa

SEQ ID NO: 15905 - DNA, 20 bp, synthetic construct
  misc_feature 1..20: note = Description of Artificial Sequence: Synthetic oligonucleotide
  misc_feature 1..20: note = Target: ANGPTL3; (+) strand; PAM type: YTN; PAM sequence: TTC
  source 1..20: mol_type = other DNA
tcaatcaaaattcttataat

SEQ ID NO: 15906 - DNA, 20 bp, synthetic construct
  misc_feature 1..20: note = Description of Artificial Sequence: Synthetic oligonucleotide
  misc_feature 1..20: note = Target: ANGPTL3; (+) strand; PAM type: YTN; PAM sequence: CTC
  source 1..20: mol_type = other DNA
aatcaaaattcttataatac

SEQ ID NO: 15907 - DNA, 20 bp, synthetic construct
  misc_feature 1..20: note = Description of Artificial Sequence: Synthetic oligonucleotide
  misc_feature 1..20: note = Target: ANGPTL3; (+) strand; PAM type: YTN; PAM sequence: TTC
  source 1..20: mol_type = other DNA
ttataatactatttgtttta

SEQ ID NO: 15908 - DNA, 20 bp, synthetic construct
  misc_feature 1..20: note = Description of Artificial Sequence: Synthetic oligonucleotide
  misc_feature 1..20: note = Target: ANGPTL3; (+) strand; PAM type: YTN; PAM sequence: CTT
  source 1..20: mol_type = other DNA
ataatactatttgttttaaa

SEQ ID NO: 15909 - DNA, 20 bp, synthetic construct
  misc_feature 1..20: note = Description of Artificial Sequence: Synthetic oligonucleotide
  misc_feature 1..20: note = Target: ANGPTL3; (+) strand; PAM type: YTN; PAM sequence: TTA
  source 1..20: mol_type = other DNA
taatactatttgttttaaat

SEQ ID NO: 15910 - DNA, 20 bp, synthetic construct
  misc_feature 1..20: note = Description of Artificial Sequence: Synthetic oligonucleotide
  misc_feature 1..20: note = Target: ANGPTL3; (+) strand; PAM type: YTN; PAM sequence: CTA
  source 1..20: mol_type = other DNA
tttgttttaaattttgtgat

SEQ ID NO: 15911 - DNA, 20 bp, synthetic construct
  misc_feature 1..20: note = Description of Artificial Sequence: Synthetic oligonucleotide
  misc_feature 1..20: note = Target: ANGPTL3; (+) strand; PAM type: YTN; PAM sequence: TTT
  source 1..20: mol_type = other DNA
gttttaaattttgtgatgtg

SEQ ID NO: 15912 - DNA, 20 bp, synthetic construct
  misc_feature 1..20: note = Description of Artificial Sequence: Synthetic oligonucleotide
  misc_feature 1..20: note = Target: ANGPTL3; (+) strand; PAM type: YTN; PAM sequence: TTG
  source 1..20: mol_type = other DNA
ttttaaattttgtgatgtgg

SEQ ID NO: 15913 - DNA, 20 bp, synthetic construct
  misc_feature 1..20: note = Description of Artificial Sequence: Synthetic oligonucleotide
  misc_feature 1..20: note = Target: ANGPTL3; (+) strand; PAM type: YTN; PAM sequence: TTT
  source 1..20: mol_type = other DNA
taaattttgtgatgtgggaa

SEQ ID NO: 15914 - DNA, 20 bp, synthetic construct
  misc_feature 1..20: note = Description of Artificial Sequence: Synthetic oligonucleotide
  misc_feature 1..20: note = Target: ANGPTL3; (+) strand; PAM type: YTN; PAM sequence: TTT
  source 1..20: mol_type = other DNA
aaattttgtgatgtgggaat

SEQ ID NO: 15915 - DNA, 20 bp, synthetic construct
  misc_feature 1..20: note = Description of Artificial Sequence: Synthetic oligonucleotide
  misc_feature 1..20: note = Target: ANGPTL3; (+) strand; PAM type: YTN; PAM sequence: TTA
  source 1..20: mol_type = other DNA
aattttgtgatgtgggaatc

SEQ ID NO: 15916 - DNA, 20 bp, synthetic construct
  misc_feature 1..20: note = Description of Artificial Sequence: Synthetic oligonucleotide
  misc_feature 1..20: note = Target: ANGPTL3; (+) strand; PAM type: YTN; PAM sequence: TTT
  source 1..20: mol_type = other DNA
tgtgatgtgggaatcaattt

SEQ ID NO: 15917 - DNA, 20 bp, synthetic construct
  misc_feature 1..20: note = Description of Artificial Sequence: Synthetic oligonucleotide
  misc_feature 1..20: note = Target: ANGPTL3; (+) strand; PAM type: YTN; PAM sequence: TTT
  source 1..20: mol_type = other DNA
gtgatgtgggaatcaatttt

SEQ ID NO: 15918 - DNA, 20 bp, synthetic construct
  misc_feature 1..20: note = Description of Artificial Sequence: Synthetic oligonucleotide
  misc_feature 1..20: note = Target: ANGPTL3; (+) strand; PAM type: YTN; PAM sequence: TTG
  source 1..20: mol_type = other DNA
tgatgtgggaatcaatttta

SEQ ID NO: 15919 - DNA, 20 bp, synthetic construct
  misc_feature 1..20: note = Description of Artificial Sequence: Synthetic oligonucleotide
  misc_feature 1..20: note = Target: ANGPTL3; (+) strand; PAM type: YTN; PAM sequence: TTT
  source 1..20: mol_type = other DNA
tagatggtcacaatctagat

SEQ ID NO: 15920 - DNA, 20 bp, synthetic construct
  misc_feature 1..20: note = Description of Artificial Sequence: Synthetic oligonucleotide
  misc_feature 1..20: note = Target: ANGPTL3; (+) strand; PAM type: YTN; PAM sequence: TTT
  source 1..20: mol_type = other DNA
agatggtcacaatctagatt

SEQ ID NO: 15921 - DNA, 20 bp, synthetic construct
  misc_feature 1..20: note = Description of Artificial Sequence: Synthetic oligonucleotide
  misc_feature 1..20: note = Target: ANGPTL3; (+) strand; PAM type: YTN; PAM sequence: TTA
  source 1..20: mol_type = other DNA
gatggtcacaatctagatta

SEQ ID NO: 15922 - DNA, 20 bp, synthetic construct
  misc_feature 1..20: note = Description of Artificial Sequence: Synthetic oligonucleotide
  misc_feature 1..20: note = Target: ANGPTL3; (+) strand; PAM type: YTN; PAM sequence: CTA
  source 1..20: mol_type = other DNA
gattataatcaataggtgaa

SEQ ID NO: 15923 - DNA, 20 bp, synthetic construct
  misc_feature 1..20: note = Description of Artificial Sequence: Synthetic oligonucleotide
  misc_feature 1..20: note = Target: ANGPTL3; (+) strand; PAM type: YTN; PAM sequence: TTA
  source 1..20: mol_type = other DNA
taatcaataggtgaacttat

SEQ ID NO: 15924 - DNA, 20 bp, synthetic construct
  misc_feature 1..20: note = Description of Artificial Sequence: Synthetic oligonucleotide
  misc_feature 1..20: note = Target: ANGPTL3; (+) strand; PAM type: YTN; PAM sequence: CTT
  source 1..20: mol_type = other DNA
attaaataacttttctaaat

SEQ ID NO: 15925 - DNA, 20 bp, synthetic construct
  misc_feature 1..20: note = Description of Artificial Sequence: Synthetic oligonucleotide
  misc_feature 1..20: note = Target: ANGPTL3; (+) strand; PAM type: YTN; PAM sequence: TTA
  source 1..20: mol_type = other DNA
ttaaataacttttctaaata

SEQ ID NO: 15926 - DNA, 20 bp, synthetic construct
  misc_feature 1..20: note = Description of Artificial Sequence: Synthetic oligonucleotide
  misc_feature 1..20: note = Target: ANGPTL3; (+) strand; PAM type: YTN; PAM sequence: TTA
  source 1..20: mol_type = other DNA
aataacttttctaaataaaa

SEQ ID NO: 15927 - DNA, 20 bp, synthetic construct
  misc_feature 1..20: note = Description of Artificial Sequence: Synthetic oligonucleotide
  misc_feature 1..20: note = Target: ANGPTL3; (+) strand; PAM type: YTN; PAM sequence: CTT
  source 1..20: mol_type = other DNA
ttctaaataaaaaatttaga

SEQ ID NO: 15928 - DNA, 20 bp, synthetic construct
  misc_feature 1..20: note = Description of Artificial Sequence: Synthetic oligonucleotide
  misc_feature 1..20: note = Target: ANGPTL3; (+) strand; PAM type: YTN; PAM sequence: TTT
  source 1..20: mol_type = other DNA
tctaaataaaaaatttagag

SEQ ID NO: 15929 - DNA, 20 bp, synthetic construct
  misc_feature 1..20: note = Description of Artificial Sequence: Synthetic oligonucleotide
  misc_feature 1..20: note = Target: ANGPTL3; (+) strand; PAM type: YTN; PAM sequence: TTT
  source 1..20: mol_type = other DNA
ctaaataaaaaatttagaga

SEQ ID NO: 15930 - DNA, 20 bp, synthetic construct
  misc_feature 1..20: note = Description of Artificial Sequence: Synthetic oligonucleotide
  misc_feature 1..20: note = Target: ANGPTL3; (+) strand; PAM type: YTN; PAM sequence: TTC
  source 1..20: mol_type = other DNA
taaataaaaaatttagagac

SEQ ID NO: 15931 - DNA, 20 bp, synthetic construct
  misc_feature 1..20: note = Description of Artificial Sequence: Synthetic oligonucleotide
  misc_feature 1..20: note = Target: ANGPTL3; (+) strand; PAM type: YTN; PAM sequence: CTA
  source 1..20: mol_type = other DNA
aataaaaaatttagagactt

SEQ ID NO: 15932 - DNA, 20 bp, synthetic construct
  misc_feature 1..20: note = Description of Artificial Sequence: Synthetic oligonucleotide
  misc_feature 1..20: note = Target: ANGPTL3; (+) strand; PAM type: YTN; PAM sequence: TTT
  source 1..20: mol_type = other DNA
agagacttttattttaaaag

SEQ ID NO: 15933 - DNA, 20 bp, synthetic construct
  misc_feature 1..20: note = Description of Artificial Sequence: Synthetic oligonucleotide
  misc_feature 1..20: note = Target: ANGPTL3; (+) strand; PAM type: YTN; PAM sequence: TTA
  source 1..20: mol_type = other DNA
gagacttttattttaaaagg

SEQ ID NO: 15934 - DNA, 20 bp, synthetic construct
  misc_feature 1..20: note = Description of Artificial Sequence: Synthetic oligonucleotide
  misc_feature 1..20: note = Target: ANGPTL3; (+) strand; PAM type: YTN; PAM sequence: CTT
  source 1..20: mol_type = other DNA
ttattttaaaaggcatcata

SEQ ID NO: 15935 - DNA, 20 bp, synthetic construct
  misc_feature 1..20: note = Description of Artificial Sequence: Synthetic oligonucleotide
  misc_feature 1..20: note = Target: ANGPTL3; (+) strand; PAM type: YTN; PAM sequence: TTT
  source 1..20: mol_type = other DNA
tattttaaaaggcatcatat

SEQ ID NO: 15936 - DNA, 20 bp, synthetic construct
  misc_feature 1..20: note = Description of Artificial Sequence: Synthetic oligonucleotide
  misc_feature 1..20: note = Target: ANGPTL3; (+) strand; PAM type: YTN; PAM sequence: TTT
  source 1..20: mol_type = other DNA
attttaaaaggcatcatatg

SEQ ID NO: 15937 - DNA, 20 bp, synthetic construct
  misc_feature 1..20: note = Description of Artificial Sequence: Synthetic oligonucleotide
  misc_feature 1..20: note = Target: ANGPTL3; (+) strand; PAM type: YTN; PAM sequence: TTA
  source 1..20: mol_type = other DNA
ttttaaaaggcatcatatga

SEQ ID NO: 15938 - DNA, 20 bp, synthetic construct
  misc_feature 1..20: note = Description of Artificial Sequence: Synthetic oligonucleotide
  misc_feature 1..20: note = Target: ANGPTL3; (+) strand; PAM type: YTN; PAM sequence: TTT
  source 1..20: mol_type = other DNA
taaaaggcatcatatgagct

SEQ ID NO: 15939 - DNA, 20 bp, synthetic construct
  misc_feature 1..20: note = Description of Artificial Sequence: Synthetic oligonucleotide
  misc_feature 1..20: note = Target: ANGPTL3; (+) strand; PAM type: YTN; PAM sequence: TTT
  source 1..20: mol_type = other DNA
aaaaggcatcatatgagcta

SEQ ID NO: 15940 - DNA, 20 bp, synthetic construct
  misc_feature 1..20: note = Description of Artificial Sequence: Synthetic oligonucleotide
  misc_feature 1..20: note = Target: ANGPTL3; (+) strand; PAM type: YTN; PAM sequence: TTA
  source 1..20: mol_type = other DNA
aaaggcatcatatgagctaa

SEQ ID NO: 15941 - DNA, 20 bp, synthetic construct
  misc_feature 1..20: note = Description of Artificial Sequence: Synthetic oligonucleotide
  misc_feature 1..20: note = Target: ANGPTL3; (+) strand; PAM type: YTN; PAM sequence: CTA
  source 1..20: mol_type = other DNA
atatcacaactttcccagtt

SEQ ID NO: 15942 - DNA, 20 bp, synthetic construct
  misc_feature 1..20: note = Description of Artificial Sequence: Synthetic oligonucleotide
  misc_feature 1..20: note = Target: ANGPTL3; (+) strand; PAM type: YTN; PAM sequence: CTT
  source 1..20: mol_type = other DNA
tcccagtttaaaaaactagt

SEQ ID NO: 15943 - DNA, 20 bp, synthetic construct
  misc_feature 1..20: note = Description of Artificial Sequence: Synthetic oligonucleotide
  misc_feature 1..20: note = Target: ANGPTL3; (+) strand; PAM type: YTN; PAM sequence: TTT
  source 1..20: mol_type = other DNA
cccagtttaaaaaactagta

SEQ ID NO: 15944 - DNA, 20 bp, synthetic construct
  misc_feature 1..20: note = Description of Artificial Sequence: Synthetic oligonucleotide
  misc_feature 1..20: note = Target: ANGPTL3; (+) strand; PAM type: YTN; PAM sequence: TTC
  source 1..20: mol_type = other DNA
ccagtttaaaaaactagtac

SEQ ID NO: 15945 - DNA, 20 bp, synthetic construct
  misc_feature 1..20: note = Description of Artificial Sequence: Synthetic oligonucleotide
  misc_feature 1..20: note = Target: ANGPTL3; (+) strand; PAM type: YTN; PAM sequence: TTT
  source 1..20: mol_type = other DNA
aaaaaactagtactcttgtt

SEQ ID NO: 15946 - DNA, 20 bp, synthetic construct
  misc_feature 1..20: note = Description of Artificial Sequence: Synthetic oligonucleotide
  misc_feature 1..20: note = Target: ANGPTL3; (+) strand; PAM type: YTN; PAM sequence: TTA
  source 1..20: mol_type = other DNA
aaaaactagtactcttgtta

SEQ ID NO: 15947 - DNA, 20 bp, synthetic construct
  misc_feature 1..20: note = Description of Artificial Sequence: Synthetic oligonucleotide
  misc_feature 1..20: note = Target: ANGPTL3; (+) strand; PAM type: YTN; PAM sequence: CTA
  source 1..20: mol_type = other DNA
gtactcttgttaaaactcta

SEQ ID NO: 15948 - DNA, 20 bp, synthetic construct
  misc_feature 1..20: note = Description of Artificial Sequence: Synthetic oligonucleotide
  misc_feature 1..20: note = Target: ANGPTL3; (+) strand; PAM type: YTN; PAM sequence: CTC
  source 1..20: mol_type = other DNA
ttgttaaaactctaaacttg

SEQ ID NO: 15949 - DNA, 20 bp, synthetic construct
  misc_feature 1..20: note = Description of Artificial Sequence: Synthetic oligonucleotide
  misc_feature 1..20: note = Target: ANGPTL3; (+) strand; PAM type: YTN; PAM sequence: CTT
  source 1..20: mol_type = other DNA
gttaaaactctaaacttgac

SEQ ID NO: 15950 - DNA, 20 bp, synthetic construct
  misc_feature 1..20: note = Description of Artificial Sequence: Synthetic oligonucleotide
  misc_feature 1..20: note = Target: ANGPTL3; (+) strand; PAM type: YTN; PAM sequence: TTG
  source 1..20: mol_type = other DNA
ttaaaactctaaacttgact

SEQ ID NO: 15951 - DNA, 20 bp, synthetic construct
  misc_feature 1..20: note = Description of Artificial Sequence: Synthetic oligonucleotide
  misc_feature 1..20: note = Target: ANGPTL3; (+) strand; PAM type: YTN; PAM sequence: TTA
  source 1..20: mol_type = other DNA
aaactctaaacttgactaaa

SEQ ID NO: 15952 - DNA, 20 bp, synthetic construct
  misc_feature 1..20: note = Description of Artificial Sequence: Synthetic oligonucleotide
  misc_feature 1..20: note = Target: ANGPTL3; (+) strand; PAM type: YTN; PAM sequence: CTC
  source 1..20: mol_type = other DNA
taaacttgactaaatacaga

SEQ ID NO: 15953 - DNA, 20 bp, synthetic construct
  misc_feature 1..20: note = Description of Artificial Sequence: Synthetic oligonucleotide
  misc_feature 1..20: note = Target: ANGPTL3; (+) strand; PAM type: YTN; PAM sequence: CTA
  source 1..20: mol_type = other DNA
aacttgactaaatacagagg

SEQ ID NO: 15954 - DNA, 20 bp, synthetic construct
  misc_feature 1..20: note = Description of Artificial Sequence: Synthetic oligonucleotide
  misc_feature 1..20: note = Target: ANGPTL3; (+) strand; PAM type: YTN; PAM sequence: CTT
  source 1..20: mol_type = other DNA
gactaaatacagaggactgg

SEQ ID NO: 15955 - DNA, 20 bp, synthetic construct
  misc_feature 1..20: note = Description of Artificial Sequence: Synthetic oligonucleotide
  misc_feature 1..20: note = Target: ANGPTL3; (+) strand; PAM type: YTN; PAM sequence: TTG
  source 1..20: mol_type = other DNA
actaaatacagaggactggt

SEQ ID NO: 15956 - DNA, 20 bp, synthetic construct
  misc_feature 1..20: note = Description of Artificial Sequence: Synthetic oligonucleotide
  misc_feature 1..20: note = Target: ANGPTL3; (+) strand; PAM type: YTN; PAM sequence: CTA
  source 1..20: mol_type = other DNA
aatacagaggactggtaatt

SEQ ID NO: 15957 - DNA, 20 bp, synthetic construct
  misc_feature 1..20: note = Description of Artificial Sequence: Synthetic oligonucleotide
  misc_feature 1..20: note = Target: ANGPTL3; (+) strand; PAM type: YTN; PAM sequence: CTG
  source 1..20: mol_type = other DNA
gtaattgtacagttcttaaa

SEQ ID NO: 15958 - DNA, 20 bp, synthetic construct
  misc_feature 1..20: note = Description of Artificial Sequence: Synthetic oligonucleotide
  misc_feature 1..20: note = Target: ANGPTL3; (+) strand; PAM type: YTN; PAM sequence: TTG
  source 1..20: mol_type = other DNA
tacagttcttaaatgttgta

SEQ ID NO: 15959 - DNA, 20 bp, synthetic construct
  misc_feature 1..20: note = Description of Artificial Sequence: Synthetic oligonucleotide
  misc_feature 1..20: note = Target: ANGPTL3; (+) strand; PAM type: YTN; PAM sequence: TTC
  source 1..20: mol_type = other DNA
ttaaatgttgtagtattaat

SEQ ID NO: 15960 - DNA, 20 bp, synthetic construct
  misc_feature 1..20: note = Description of Artificial Sequence: Synthetic oligonucleotide
  misc_feature 1..20: note = Target: ANGPTL3; (+) strand; PAM type: YTN; PAM sequence: CTT
  source 1..20: mol_type = other DNA
aaatgttgtagtattaattt

SEQ ID NO: 15961 - DNA, 20 bp, synthetic construct
  misc_feature 1..20: note = Description of Artificial Sequence: Synthetic oligonucleotide
  misc_feature 1..20: note = Target: ANGPTL3; (+) strand; PAM type: YTN; PAM sequence: TTA
  source 1..20: mol_type = other DNA
aatgttgtagtattaatttc

SEQ ID NO: 15962 - DNA, 20 bp, synthetic construct
  misc_feature 1..20: note = Description of Artificial Sequence: Synthetic oligonucleotide
  misc_feature 1..20: note = Target: ANGPTL3; (+) strand; PAM type: YTN; PAM sequence: TTG
  source 1..20: mol_type = other DNA
tagtattaatttcaaaacta

SEQ ID NO: 15963 - DNA, 20 bp, synthetic construct
  misc_feature 1..20: note = Description of Artificial Sequence: Synthetic oligonucleotide
  misc_feature 1..20: note = Target: ANGPTL3; (+) strand; PAM type: YTN; PAM sequence: TTA
  source 1..20: mol_type = other DNA
atttcaaaactaaaaatcgt

SEQ ID NO: 15964 - DNA, 20 bp, synthetic construct
  misc_feature 1..20: note = Description of Artificial Sequence: Synthetic oligonucleotide
  misc_feature 1..20: note = Target: ANGPTL3; (+) strand; PAM type: YTN; PAM sequence: TTT
  source 1..20: mol_type = other DNA
caaaactaaaaatcgtcagc

SEQ ID NO: 15965 - DNA, 20 bp, synthetic construct
  misc_feature 1..20: note = Description of Artificial Sequence: Synthetic oligonucleotide
  misc_feature 1..20: note = Target: ANGPTL3; (+) strand; PAM type: YTN; PAM sequence: TTC
  source 1..20: mol_type = other DNA
aaaactaaaaatcgtcagca

SEQ ID NO: 15966 - DNA, 20 bp, synthetic construct
  misc_feature 1..20: note = Description of Artificial Sequence: Synthetic oligonucleotide
  misc_feature 1..20: note = Target: ANGPTL3; (+) strand; PAM type: YTN; PAM sequence: CTA
  source 1..20: mol_type = other DNA
aaaatcgtcagcacagagta

SEQ ID NO: 15967 - DNA, 20 bp, synthetic construct
  misc_feature 1..20: note = Description of Artificial Sequence: Synthetic oligonucleotide
  misc_feature 1..20: note = Target: ANGPTL3; (+) strand; PAM type: YTN; PAM sequence: CTG
  source 1..20: mol_type = other DNA
taatacaaatttttaaactg

SEQ ID NO: 15968 - DNA, 20 bp, synthetic construct
  misc_feature 1..20: note = Description of Artificial Sequence: Synthetic oligonucleotide
  misc_feature 1..20: note = Target: ANGPTL3; (+) strand; PAM type: YTN; PAM sequence: TTT
  source 1..20: mol_type = other DNA
ttaaactgatgcttcatttt

SEQ ID NO: 15969 - DNA, 20 bp, synthetic construct
  misc_feature 1..20: note = Description of Artificial Sequence: Synthetic oligonucleotide
  misc_feature 1..20: note = Target: ANGPTL3; (+) strand; PAM type: YTN; PAM sequence: TTT
  source 1..20: mol_type = other DNA
taaactgatgcttcattttg

SEQ ID NO: 15970 - DNA, 20 bp, synthetic construct
  misc_feature 1..20: note = Description of Artificial Sequence: Synthetic oligonucleotide
  misc_feature 1..20: note = Target: ANGPTL3; (+) strand; PAM type: YTN; PAM sequence: TTT
  source 1..20: mol_type = other DNA
aaactgatgcttcattttgc

SEQ ID NO: 15971 - DNA, 20 bp, synthetic construct
  misc_feature 1..20: note = Description of Artificial Sequence: Synthetic oligonucleotide
  misc_feature 1..20: note = Target: ANGPTL3; (+) strand; PAM type: YTN; PAM sequence: TTA
  source 1..20: mol_type = other DNA
aactgatgcttcattttgct

SEQ ID NO: 15972 - DNA, 20 bp, synthetic construct
  misc_feature 1..20: note = Description of Artificial Sequence: Synthetic oligonucleotide
  misc_feature 1..20: note = Target: ANGPTL3; (+) strand; PAM type: YTN; PAM sequence: CTG
  source 1..20: mol_type = other DNA
atgcttcattttgctacaaa

SEQ ID NO: 15973 - DNA, 20 bp, synthetic construct
  misc_feature 1..20: note = Description of Artificial Sequence: Synthetic oligonucleotide
  misc_feature 1..20: note = Target: ANGPTL3; (+) strand; PAM type: YTN; PAM sequence: CTT
  source 1..20: mol_type = other DNA
cattttgctacaaaataatt

SEQ ID NO: 15974 - DNA, 20 bp, synthetic construct
  misc_feature 1..20: note = Description of Artificial Sequence: Synthetic oligonucleotide
  misc_feature 1..20: note = Target: ANGPTL3; (+) strand; PAM type: YTN; PAM sequence: TTC
  source 1..20: mol_type = other DNA
attttgctacaaaataattt

SEQ ID NO: 15975 - DNA, 20 bp, synthetic construct
  misc_feature 1..20: note = Description of Artificial Sequence: Synthetic oligonucleotide
  misc_feature 1..20: note = Target: ANGPTL3; (+) strand; PAM type: YTN; PAM sequence: TTT
  source 1..20: mol_type = other DNA
tgctacaaaataatttggag

SEQ ID NO: 15976 - DNA, 20 bp, synthetic construct
  misc_feature 1..20: note = Description of Artificial Sequence: Synthetic oligonucleotide
  misc_feature 1..20: note = Target: ANGPTL3; (+) strand; PAM type: YTN; PAM sequence: TTT
  source 1..20: mol_type = other DNA
gctacaaaataatttggagt

SEQ ID NO: 15977 - DNA, 20 bp, synthetic construct
  misc_feature 1..20: note = Description of Artificial Sequence: Synthetic oligonucleotide
  misc_feature 1..20: note = Target: ANGPTL3; (+) strand; PAM type: YTN; PAM sequence: TTG
  source 1..20: mol_type = other DNA
ctacaaaataatttggagta

SEQ ID NO: 15978 - DNA, 20 bp, synthetic construct
  misc_feature 1..20: note = Description of Artificial Sequence: Synthetic oligonucleotide
  misc_feature 1..20: note = Target: ANGPTL3; (+) strand; PAM type: YTN; PAM sequence: CTA
  source 1..20: mol_type = other DNA
caaaataatttggagtaaat

SEQ ID NO: 15979 - DNA, 20 bp, synthetic construct
  misc_feature 1..20: note = Description of Artificial Sequence: Synthetic oligonucleotide
  misc_feature 1..20: note = Target: ANGPTL3; (+) strand; PAM type: YTN; PAM sequence: TTT
  source 1..20: mol_type = other DNA
ggagtaaatgtttgatatga

SEQ ID NO: 15980 - DNA, 20 bp, synthetic construct
  misc_feature 1..20: note = Description of Artificial Sequence: Synthetic oligonucleotide
  misc_feature 1..20: note = Target: ANGPTL3; (+) strand; PAM type: YTN; PAM sequence: TTG
  source 1..20: mol_type = other DNA
gagtaaatgtttgatatgat

SEQ ID NO: 15981 - DNA, 20 bp, synthetic construct
  misc_feature 1..20: note = Description of Artificial Sequence: Synthetic oligonucleotide
  misc_feature 1..20: note = Target: ANGPTL3; (+) strand; PAM type: YTN; PAM sequence: TTT
  source 1..20: mol_type = other DNA
gatatgatttatttatgaaa

SEQ ID NO: 15982 - DNA, 20 bp, synthetic construct
  misc_feature 1..20: note = Description of Artificial Sequence: Synthetic oligonucleotide
  misc_feature 1..20: note = Target: ANGPTL3; (+) strand; PAM type: YTN; PAM sequence: TTG
  source 1..20: mol_type = other DNA
atatgatttatttatgaaac

SEQ ID NO: 15983 - DNA, 20 bp, synthetic construct
  misc_feature 1..20: note = Description of Artificial Sequence: Synthetic oligonucleotide
  misc_feature 1..20: note = Target: ANGPTL3; (+) strand; PAM type: YTN; PAM sequence: TTT
  source 1..20: mol_type = other DNA
atttatgaaacctaatgaag

SEQ ID NO: 15984 - DNA, 20 bp, synthetic construct
  misc_feature 1..20: note = Description of Artificial Sequence: Synthetic oligonucleotide
  misc_feature 1..20: note = Target: ANGPTL3; (+) strand; PAM type: YTN; PAM sequence: TTA
  source 1..20: mol_type = other DNA
tttatgaaacctaatgaagc

SEQ ID NO: 15985 - DNA, 20 bp, synthetic construct
  misc_feature 1..20: note = Description of Artificial Sequence: Synthetic oligonucleotide
  misc_feature 1..20: note = Target: ANGPTL3; (+) strand; PAM type: YTN; PAM sequence: TTT
  source 1..20: mol_type = other DNA
atgaaacctaatgaagcaga

SEQ ID NO: 15986 - DNA, 20 bp, synthetic construct
  misc_feature 1..20: note = Description of Artificial Sequence: Synthetic oligonucleotide
  misc_feature 1..20: note = Target: ANGPTL3; (+) strand; PAM type: YTN; PAM sequence: TTA
  source 1..20: mol_type = other DNA
tgaaacctaatgaagcagaa

SEQ ID NO: 15987 - DNA, 20 bp, synthetic construct
  misc_feature 1..20: note = Description of Artificial Sequence: Synthetic oligonucleotide
  misc_feature 1..20: note = Target: ANGPTL3; (+) strand; PAM type: YTN; PAM sequence: CTA
  source 1..20: mol_type = other DNA
atgaagcagaattaaatact

SEQ ID NO: 15988 - DNA, 20 bp, synthetic construct
  misc_feature 1..20: note = Description of Artificial Sequence: Synthetic oligonucleotide
  misc_feature 1..20: note = Target: ANGPTL3; (+) strand; PAM type: YTN; PAM sequence: TTA
  source 1..20: mol_type = other DNA
aatactgtattaaaataagt

SEQ ID NO: 15989 - DNA, 20 bp, synthetic construct
  misc_feature 1..20: note = Description of Artificial Sequence: Synthetic oligonucleotide
  misc_feature 1..20: note = Target: ANGPTL3; (+) strand; PAM type: YTN; PAM sequence: CTG
  source 1..20: mol_type = other DNA
tattaaaataagttcgctgt

SEQ ID NO: 15990 - DNA, 20 bp, synthetic construct
  misc_feature 1..20: note = Description of Artificial Sequence: Synthetic oligonucleotide
  misc_feature 1..20: note = Target: ANGPTL3; (+) strand; PAM type: YTN; PAM sequence: TTA
  source 1..20: mol_type = other DNA
aaataagttcgctgtcttta

SEQ ID NO: 15991 - DNA, 20 bp, synthetic construct
  misc_feature 1..20: note = Description of Artificial Sequence: Synthetic oligonucleotide
  misc_feature 1..20: note = Target: ANGPTL3; (+) strand; PAM type: YTN; PAM sequence: TTC
  source 1..20: mol_type = other DNA
gctgtctttaaacaaatgga

SEQ ID NO: 15992 - DNA, 20 bp, synthetic construct
  misc_feature 1..20: note = Description of Artificial Sequence: Synthetic oligonucleotide
  misc_feature 1..20: note = Target: ANGPTL3; (+) strand; PAM type: YTN; PAM sequence: CTG
  source 1..20: mol_type = other DNA
tctttaaacaaatggagatg

SEQ ID NO: 15993 - DNA, 20 bp, synthetic construct
  misc_feature 1..20: note = Description of Artificial Sequence: Synthetic oligonucleotide
  misc_feature 1..20: note = Target: ANGPTL3; (+) strand; PAM type: YTN; PAM sequence: CTT
  source 1..20: mol_type = other DNA
taaacaaatggagatgacta

SEQ ID NO: 15994 - DNA, 20 bp, synthetic construct
  misc_feature 1..20: note = Description of Artificial Sequence: Synthetic oligonucleotide
  misc_feature 1..20: note = Target: ANGPTL3; (+) strand; PAM type: YTN; PAM sequence: TTT
  source 1..20: mol_type = other DNA
aaacaaatggagatgactac

SEQ ID NO: 15995 - DNA, 20 bp, synthetic construct
  misc_feature 1..20: note = Description of Artificial Sequence: Synthetic oligonucleotide
  misc_feature 1..20: note = Target: ANGPTL3; (+) strand; PAM type: YTN; PAM sequence: TTA
  source 1..20: mol_type = other DNA
aacaaatggagatgactact

SEQ ID NO: 15996 - DNA, 20 bp, synthetic construct
  misc_feature 1..20: note = Description of Artificial Sequence: Synthetic oligonucleotide
  misc_feature 1..20: note = Target: ANGPTL3; (+) strand; PAM type: YTN; PAM sequence: CTA
  source 1..20: mol_type = other DNA
ctaagtcacattgactttaa

SEQ ID NO: 15997 - DNA, 20 bp, synthetic construct
  misc_feature 1..20: note = Description of Artificial Sequence: Synthetic oligonucleotide
  misc_feature 1..20: note = Target: ANGPTL3; (+) strand; PAM type: YTN; PAM sequence: CTA
  source 1..20: mol_type = other DNA
agtcacattgactttaacat

SEQ ID NO: 15998 - DNA, 20 bp, synthetic construct
  misc_feature 1..20: note = Description of Artificial Sequence: Synthetic oligonucleotide
  misc_feature 1..20: note = Target: ANGPTL3; (+) strand; PAM type: YTN; PAM sequence: TTG
  source 1..20: mol_type = other DNA
actttaacatgaggtatcac

SEQ ID NO: 15999 - DNA, 20 bp, synthetic construct
  misc_feature 1..20: note = Description of Artificial Sequence: Synthetic oligonucleotide
  misc_feature 1..20: note = Target: ANGPTL3; (+) strand; PAM type: YTN; PAM sequence: CTT
  source 1..20: mol_type = other DNA
taacatgaggtatcactata

SEQ ID NO: 16000 - DNA, 20 bp, synthetic construct
  misc_feature 1..20: note = Description of Artificial Sequence: Synthetic oligonucleotide
  misc_feature 1..20: note = Target: ANGPTL3; (+) strand; PAM type: YTN; PAM sequence: TTT
  source 1..20: mol_type = other DNA
aacatgaggtatcactatac

SEQ ID NO: 16001 - DNA, 20 bp, synthetic construct
  misc_feature 1..20: note = Description of Artificial Sequence: Synthetic oligonucleotide
  misc_feature 1..20: note = Target: ANGPTL3; (+) strand; PAM type: YTN; PAM sequence: TTA
  source 1..20: mol_type = other DNA
acatgaggtatcactatacc

SEQ ID NO: 16002 - DNA, 20 bp, synthetic construct
  misc_feature 1..20: note = Description of Artificial Sequence: Synthetic oligonucleotide
  misc_feature 1..20: note = Target: ANGPTL3; (+) strand; PAM type: YTN; PAM sequence: CTA
  source 1..20: mol_type = other DNA
taccttatttgttaaaatat

SEQ ID NO: 16003 - DNA, 20 bp, synthetic construct
  misc_feature 1..20: note = Description of Artificial Sequence: Synthetic oligonucleotide
  misc_feature 1..20: note = Target: ANGPTL3; (+) strand; PAM type: YTN; PAM sequence: CTT
  source 1..20: mol_type = other DNA
atttgttaaaatatatactg

SEQ ID NO: 16004 - DNA, 20 bp, synthetic construct
  misc_feature 1..20: note = Description of Artificial Sequence: Synthetic oligonucleotide
  misc_feature 1..20: note = Target: ANGPTL3; (+) strand; PAM type: YTN; PAM sequence: TTA
  source 1..20: mol_type = other DNA
tttgttaaaatatatactgt

SEQ ID NO: 16005 - DNA, 20 bp, synthetic construct
  misc_feature 1..20: note = Description of Artificial Sequence: Synthetic oligonucleotide
  misc_feature 1..20: note = Target: ANGPTL3; (+) strand; PAM type: YTN; PAM sequence: TTT
  source 1..20: mol_type = other DNA
gttaaaatatatactgtata

SEQ ID NO: 16006 - DNA, 20 bp, synthetic construct
  misc_feature 1..20: note = Description of Artificial Sequence: Synthetic oligonucleotide
  misc_feature 1..20: note = Target: ANGPTL3; (+) strand; PAM type: YTN; PAM sequence: TTG
  source 1..20: mol_type = other DNA
ttaaaatatatactgtatac

SEQ ID NO: 16007 - DNA, 20 bp, synthetic construct
  misc_feature 1..20: note = Description of Artificial Sequence: Synthetic oligonucleotide
  misc_feature 1..20: note = Target: ANGPTL3; (+) strand; PAM type: YTN; PAM sequence: TTA
  source 1..20: mol_type = other DNA
aaatatatactgtatacatt

SEQ ID NO: 16008 - DNA, 20 bp, synthetic construct
  misc_feature 1..20: note = Description of Artificial Sequence: Synthetic oligonucleotide
  misc_feature 1..20: note = Target: ANGPTL3; (+) strand; PAM type: YTN; PAM sequence: CTG
  source 1..20: mol_type = other DNA
tatacattttatatatttta

SEQ ID NO: 16009 - DNA, 20 bp, synthetic construct
  misc_feature 1..20: note = Description of Artificial Sequence: Synthetic oligonucleotide
  misc_feature 1..20: note = Target: ANGPTL3; (+) strand; PAM type: YTN; PAM sequence: TTT
  source 1..20: mol_type = other DNA
tatatattttaacacttaat

SEQ ID NO: 16010 - DNA, 20 bp, synthetic construct
  misc_feature 1..20: note = Description of Artificial Sequence: Synthetic oligonucleotide
  misc_feature 1..20: note = Target: ANGPTL3; (+) strand; PAM type: YTN; PAM sequence: TTT
  source 1..20: mol_type = other DNA
atatattttaacacttaata

SEQ ID NO: 16011 - DNA, 20 bp, synthetic construct
  misc_feature 1..20: note = Description of Artificial Sequence: Synthetic oligonucleotide
  misc_feature 1..20: note = Target: ANGPTL3; (+) strand; PAM type: YTN; PAM sequence: TTA
  source 1..20: mol_type = other DNA
tatattttaacacttaatac

SEQ ID NO: 16012 - DNA, 20 bp, synthetic construct
  misc_feature 1..20: note = Description of Artificial Sequence: Synthetic oligonucleotide
  misc_feature 1..20: note = Target: ANGPTL3; (+) strand; PAM type: YTN; PAM sequence: TTT
  source 1..20: mol_type = other DNA
taacacttaatactatgaaa

SEQ ID NO: 16013 - DNA, 20 bp, synthetic construct
  misc_feature 1..20: note = Description of Artificial Sequence: Synthetic oligonucleotide
  misc_feature 1..20: note = Target: ANGPTL3; (+) strand; PAM type: YTN; PAM sequence: TTT
  source 1..20: mol_type = other DNA
aacacttaatactatgaaaa

SEQ ID NO: 16014 - DNA, 20 bp, synthetic construct
  misc_feature 1..20: note = Description of Artificial Sequence: Synthetic oligonucleotide
  misc_feature 1..20: note = Target: ANGPTL3; (+) strand; PAM type: YTN; PAM sequence: TTA
  source 1..20: mol_type = other DNA
acacttaatactatgaaaac

SEQ ID NO: 16015 - DNA, 20 bp, synthetic construct
  misc_feature 1..20: note = Description of Artificial Sequence: Synthetic oligonucleotide
  misc_feature 1..20: note = Target: ANGPTL3; (+) strand; PAM type: YTN; PAM sequence: CTT
  source 1..20: mol_type = other DNA
aatactatgaaaacaaataa

SEQ ID NO: 16016 - DNA, 20 bp, synthetic construct
  misc_feature 1..20: note = Description of Artificial Sequence: Synthetic oligonucleotide
  misc_feature 1..20: note = Target: ANGPTL3; (+) strand; PAM type: YTN; PAM sequence: TTA
  source 1..20: mol_type = other DNA
atactatgaaaacaaataat

SEQ ID NO: 16017 - DNA, 20 bp, synthetic construct
  misc_feature 1..20: note = Description of Artificial Sequence: Synthetic oligonucleotide
  misc_feature 1..20: note = Target: ANGPTL3; (+) strand; PAM type: YTN; PAM sequence: CTA
  source 1..20: mol_type = other DNA
tgaaaacaaataattgtaaa

SEQ ID NO: 16018 - DNA, 20 bp, synthetic construct
  misc_feature 1..20: note = Description of Artificial Sequence: Synthetic oligonucleotide
  misc_feature 1..20: note = Target: ANGPTL3; (+) strand; PAM type: YTN; PAM sequence: TTG
  source 1..20: mol_type = other DNA
taaaggaatcttgtcagatt

SEQ ID NO: 16019 - DNA, 20 bp, synthetic construct
  misc_feature 1..20: note = Description of Artificial Sequence: Synthetic oligonucleotide
  misc_feature 1..20: note = Target: ANGPTL3; (+) strand; PAM type: YTN; PAM sequence: CTT
  source 1..20: mol_type = other DNA
gtcagattacagtaagaatg

SEQ ID NO: 16020 - DNA, 20 bp, synthetic construct
  misc_feature 1..20: note = Description of Artificial Sequence: Synthetic oligonucleotide
  misc_feature 1..20: note = Target: ANGPTL3; (+) strand; PAM type: YTN; PAM sequence: TTG
  source 1..20: mol_type = other DNA
tcagattacagtaagaatga

SEQ ID NO: 16021 - DNA, 20 bp, synthetic construct
  misc_feature 1..20: note = Description of Artificial Sequence: Synthetic oligonucleotide
  misc_feature 1..20: note = Target: ANGPTL3; (+) strand; PAM type: YTN; PAM sequence: TTA
  source 1..20: mol_type = other DNA
cagtaagaatgaacatattt

SEQ ID NO: 16022 - DNA, 20 bp, synthetic construct
  misc_feature 1..20: note = Description of Artificial Sequence: Synthetic oligonucleotide
  misc_feature 1..20: note = Target: ANGPTL3; (+) strand; PAM type: YTN; PAM sequence: TTT
  source 1..20: mol_type = other DNA
gtggcatcgagttaaagttt

SEQ ID NO: 16023 - DNA, 20 bp, synthetic construct
  misc_feature 1..20: note = Description of Artificial Sequence: Synthetic oligonucleotide
  misc_feature 1..20: note = Target: ANGPTL3; (+) strand; PAM type: YTN; PAM sequence: TTG
  source 1..20: mol_type = other DNA
tggcatcgagttaaagttta

SEQ ID NO: 16024 - DNA, 20 bp, synthetic construct
  misc_feature 1..20: note = Description of Artificial Sequence: Synthetic oligonucleotide
  misc_feature 1..20: note = Target: ANGPTL3; (+) strand; PAM type: YTN; PAM sequence: TTA
  source 1..20: mol_type = other DNA
aagtttatatttcccctaaa

SEQ ID NO: 16025 - DNA, 20 bp, synthetic construct
  misc_feature 1..20: note = Description of Artificial Sequence: Synthetic oligonucleotide
  misc_feature 1..20: note = Target: ANGPTL3; (+) strand; PAM type: YTN; PAM sequence: TTT
  source 1..20: mol_type = other DNA
atatttcccctaaatatgct

SEQ ID NO: 16026 - DNA, 20 bp, synthetic construct
  misc_feature 1..20: note = Description of Artificial Sequence: Synthetic oligonucleotide
  misc_feature 1..20: note = Target: ANGPTL3; (+) strand; PAM type: YTN; PAM sequence: TTA
  source 1..20: mol_type = other DNA
tatttcccctaaatatgctg

SEQ ID NO: 16027 - DNA, 20 bp, synthetic construct
  misc_feature 1..20: note = Description of Artificial Sequence: Synthetic oligonucleotide
  misc_feature 1..20: note = Target: ANGPTL3; (+) strand; PAM type: YTN; PAM sequence: TTT
  source 1..20: mol_type = other DNA
cccctaaatatgctgtgatt

SEQ ID NO: 16028 - DNA, 20 bp, synthetic construct
  misc_feature 1..20: note = Description of Artificial Sequence: Synthetic oligonucleotide
  misc_feature 1..20: note = Target: ANGPTL3; (+) strand; PAM type: YTN; PAM sequence: TTC
  source 1..20: mol_type = other DNA
ccctaaatatgctgtgattc

SEQ ID NO: 16029 - DNA, 20 bp, synthetic construct
  misc_feature 1..20: note = Description of Artificial Sequence: Synthetic oligonucleotide
  misc_feature 1..20: note = Target: ANGPTL3; (+) strand; PAM type: YTN; PAM sequence: CTA
  source 1..20: mol_type = other DNA
aatatgctgtgattctaata

SEQ ID NO: 16030 - DNA, 20 bp, synthetic construct
  misc_feature 1..20: note = Description of Artificial Sequence: Synthetic oligonucleotide
  misc_feature 1..20: note = Target: ANGPTL3; (+) strand; PAM type: YTN; PAM sequence: CTG
  source 1..20: mol_type = other DNA
tgattctaatacattcgtgt

SEQ ID NO: 16031 - DNA, 20 bp, synthetic construct
  misc_feature 1..20: note = Description of Artificial Sequence: Synthetic oligonucleotide
  misc_feature 1..20: note = Target: ANGPTL3; (+) strand; PAM type: YTN; PAM sequence: TTC
  source 1..20: mol_type = other DNA
taatacattcgtgtaggttt

SEQ ID NO: 16032 - DNA, 20 bp, synthetic construct
  misc_feature 1..20: note = Description of Artificial Sequence: Synthetic oligonucleotide
  misc_feature 1..20: note = Target: ANGPTL3; (+) strand; PAM type: YTN; PAM sequence: CTA
  source 1..20: mol_type = other DNA
atacattcgtgtaggttttc

SEQ ID NO: 16033 - DNA, 20 bp, synthetic construct
  misc_feature 1..20: note = Description of Artificial Sequence: Synthetic oligonucleotide
  misc_feature 1..20: note = Target: ANGPTL3; (+) strand; PAM type: YTN; PAM sequence: TTC
  source 1..20: mol_type = other DNA
gtgtaggttttcaagtagaa

SEQ ID NO: 16034 - DNA, 20 bp, synthetic construct
  misc_feature 1..20: note = Description of Artificial Sequence: Synthetic oligonucleotide
  misc_feature 1..20: note = Target: ANGPTL3; (+) strand; PAM type: YTN; PAM sequence: TTT
  source 1..20: mol_type = other DNA
tcaagtagaaataaacctcg

SEQ ID NO: 16035 - DNA, 20 bp, synthetic construct
  misc_feature 1..20: note = Description of Artificial Sequence: Synthetic oligonucleotide
  misc_feature 1..20: note = Target: ANGPTL3; (+) strand; PAM type: YTN; PAM sequence: TTT
  source 1..20: mol_type = other DNA
caagtagaaataaacctcgt

SEQ ID NO: 16036 - DNA, 20 bp, synthetic construct
  misc_feature 1..20: note = Description of Artificial Sequence: Synthetic oligonucleotide
  misc_feature 1..20: note = Target: ANGPTL3; (+) strand; PAM type: YTN; PAM sequence: TTC
  source 1..20: mol_type = other DNA
aagtagaaataaacctcgta

SEQ ID NO: 16037 - DNA, 20 bp, synthetic construct
  misc_feature 1..20: note = Description of Artificial Sequence: Synthetic oligonucleotide
  misc_feature 1..20: note = Target: ANGPTL3; (+) strand; PAM type: YTN; PAM sequence: CTC
  source 1..20: mol_type = other DNA
gtaacaagttactgaacgtt

SEQ ID NO: 16038 - DNA, 20 bp, synthetic construct
  misc_feature 1..20: note = Description of Artificial Sequence: Synthetic oligonucleotide
  misc_feature 1..20: note = Target: ANGPTL3; (+) strand; PAM type: YTN; PAM sequence: TTA
  source 1..20: mol_type = other DNA
ctgaacgtttaaacagcctg

SEQ ID NO: 16039 - DNA, 20 bp, synthetic construct
  misc_feature 1..20: note = Description of Artificial Sequence: Synthetic oligonucleotide
  misc_feature 1..20: note = Target: ANGPTL3; (+) strand; PAM type: YTN; PAM sequence: CTG
  source 1..20: mol_type = other DNA
aacgtttaaacagcctgaca

SEQ ID NO: 16040 - DNA, 20 bp, synthetic construct
  misc_feature 1..20: note = Description of Artificial Sequence: Synthetic oligonucleotide
  misc_feature 1..20: note = Target: ANGPTL3; (+) strand; PAM type: YTN; PAM sequence: TTT
  source 1..20: mol_type = other DNA
aaacagcctgacaagcatgt

SEQ ID NO: 16041 - DNA, 20 bp, synthetic construct
  misc_feature 1..20: note = Description of Artificial Sequence: Synthetic oligonucleotide
  misc_feature 1..20: note = Target: ANGPTL3; (+) strand; PAM type: YTN; PAM sequence: TTA
  source 1..20: mol_type = other DNA
aacagcctgacaagcatgta

SEQ ID NO: 16042 - DNA, 20 bp, synthetic construct
  misc_feature 1..20: note = Description of Artificial Sequence: Synthetic oligonucleotide
  misc_feature 1..20: note = Target: ANGPTL3; (+) strand; PAM type: YTN; PAM sequence: CTG
  source 1..20: mol_type = other DNA
acaagcatgtatatatgttt

SEQ ID NO: 16043 - DNA, 20 bp, synthetic construct
  misc_feature 1..20: note = Description of Artificial Sequence: Synthetic oligonucleotide
  misc_feature 1..20: note = Target: ANGPTL3; (+) strand; PAM type: YTN; PAM sequence: TTT
  source 1..20: mol_type = other DNA
aaaattcaataaacaaagac

SEQ ID NO: 16044 - DNA, 20 bp, synthetic construct
  misc_feature 1..20: note = Description of Artificial Sequence: Synthetic oligonucleotide
  misc_feature 1..20: note = Target: ANGPTL3; (+) strand; PAM type: YTN; PAM sequence: TTA
  source 1..20: mol_type = other DNA
aaattcaataaacaaagacc

SEQ ID NO: 16045 - DNA, 20 bp, synthetic construct
  misc_feature 1..20: note = Description of Artificial Sequence: Synthetic oligonucleotide
  misc_feature 1..20: note = Target: ANGPTL3; (+) strand; PAM type: YTN; PAM sequence: TTC
  source 1..20: mol_type = other DNA
aataaacaaagacccagtcc

SEQ ID NO: 16046 - DNA, 20 bp, synthetic construct
  misc_feature 1..20: note = Description of Artificial Sequence: Synthetic oligonucleotide
  misc_feature 1..20: note = Target: ANGPTL3; (+) strand; PAM type: YTN; PAM sequence: CTA
  source 1..20: mol_type = other DNA
aattatagaaatttaaatta

SEQ ID NO: 16047 - DNA, 20 bp, synthetic construct
  misc_feature 1..20: note = Description of Artificial Sequence: Synthetic oligonucleotide
  misc_feature 1..20: note = Target: ANGPTL3; (+) strand; PAM type: YTN; PAM sequence: TTA
  source 1..20: mol_type = other DNA
tagaaatttaaattattctt

SEQ ID NO: 16048 - DNA, 20 bp, synthetic construct
  misc_feature 1..20: note = Description of Artificial Sequence: Synthetic oligonucleotide
  misc_feature 1..20: note = Target: ANGPTL3; (+) strand; PAM type: YTN; PAM sequence: TTT
  source 1..20: mol_type = other DNA
aaattattcttgcatgttta

SEQ ID NO: 16049 - DNA, 20 bp, synthetic construct
  misc_feature 1..20: note = Description of Artificial Sequence: Synthetic oligonucleotide
  misc_feature 1..20: note = Target: ANGPTL3; (+) strand; PAM type: YTN; PAM sequence: TTA
  source 1..20: mol_type = other DNA
aattattcttgcatgtttat

SEQ ID NO: 16050 - DNA, 20 bp, synthetic construct
  misc_feature 1..20: note = Description of Artificial Sequence: Synthetic oligonucleotide
  misc_feature 1..20: note = Target: ANGPTL3; (+) strand; PAM type: YTN; PAM sequence: TTA
  source 1..20: mol_type = other DNA
ttcttgcatgtttatcgaca

SEQ ID NO: 16051 - DNA, 20 bp, synthetic construct
  misc_feature 1..20: note = Description of Artificial Sequence: Synthetic oligonucleotide
  misc_feature 1..20: note = Target: ANGPTL3; (+) strand; PAM type: YTN; PAM sequence: TTC
  source 1..20: mol_type = other DNA
ttgcatgtttatcgacatca

SEQ ID NO: 16052 - DNA, 20 bp, synthetic construct
  misc_feature 1..20: note = Description of Artificial Sequence: Synthetic oligonucleotide
  misc_feature 1..20: note = Target: ANGPTL3; (+) strand; PAM type: YTN; PAM sequence: CTT
  source 1..20: mol_type = other DNA
gcatgtttatcgacatcaca

SEQ ID NO: 16053 - DNA, 20 bp, synthetic construct
  misc_feature 1..20: note = Description of Artificial Sequence: Synthetic oligonucleotide
  misc_feature 1..20: note = Target: ANGPTL3; (+) strand; PAM type: YTN; PAM sequence: TTG
  source 1..20: mol_type = other DNA
catgtttatcgacatcacaa

SEQ ID NO: 16054 - DNA, 20 bp, synthetic construct
  misc_feature 1..20: note = Description of Artificial Sequence: Synthetic oligonucleotide
  misc_feature 1..20: note = Target: ANGPTL3; (+) strand; PAM type: YTN; PAM sequence: TTT
  source 1..20: mol_type = other DNA
atcgacatcacaacagatcc

SEQ ID NO: 16055 - DNA, 20 bp, synthetic construct
  misc_feature 1..20: note = Description of Artificial Sequence: Synthetic oligonucleotide
  misc_feature 1..20: note = Target: ANGPTL3; (+) strand; PAM type: YTN; PAM sequence: TTA
  source 1..20: mol_type = other DNA
tcgacatcacaacagatccc

SEQ ID NO: 16056 - DNA, 20 bp, synthetic construct
  misc_feature 1..20: note = Description of Artificial Sequence: Synthetic oligonucleotide
  misc_feature 1..20: note = Target: ANGPTL3; (+) strand; PAM type: YTN; PAM sequence: CTA
  source 1..20: mol_type = other DNA
aatccctaaatccctaaaga

SEQ ID NO: 16057 - DNA, 20 bp, synthetic construct
  misc_feature 1..20: note = Description of Artificial Sequence: Synthetic oligonucleotide
  misc_feature 1..20: note = Target: ANGPTL3; (+) strand; PAM type: YTN; PAM sequence: CTA
  source 1..20: mol_type = other DNA
aatccctaaagattagatac

SEQ ID NO: 16058 - DNA, 20 bp, synthetic construct
  misc_feature 1..20: note = Description of Artificial Sequence: Synthetic oligonucleotide
  misc_feature 1..20: note = Target: ANGPTL3; (+) strand; PAM type: YTN; PAM sequence: CTA
  source 1..20: mol_type = other DNA
aagattagatacaaattttt

SEQ ID NO: 16059 - DNA, 20 bp, synthetic construct
  misc_feature 1..20: note = Description of Artificial Sequence: Synthetic oligonucleotide
  misc_feature 1..20: note = Target: ANGPTL3; (+) strand; PAM type: YTN; PAM sequence: TTA
  source 1..20: mol_type = other DNA
gatacaaattttttaccaca

SEQ ID NO: 16060 - DNA, 20 bp, synthetic construct
  misc_feature 1..20: note = Description of Artificial Sequence: Synthetic oligonucleotide
  misc_feature 1..20: note = Target: ANGPTL3; (+) strand; PAM type: YTN; PAM sequence: TTT
  source 1..20: mol_type = other DNA
tttaccacagtatcacttgt

SEQ ID NO: 16061 - DNA, 20 bp, synthetic construct
  misc_feature 1..20: note = Description of Artificial Sequence: Synthetic oligonucleotide
  misc_feature 1..20: note = Target: ANGPTL3; (+) strand; PAM type: YTN; PAM sequence: TTT
  source 1..20: mol_type = other DNA
ttaccacagtatcacttgtc

SEQ ID NO: 16062 - DNA, 20 bp, synthetic construct
  misc_feature 1..20: note = Description of Artificial Sequence: Synthetic oligonucleotide
  misc_feature 1..20: note = Target: ANGPTL3; (+) strand; PAM type: YTN; PAM sequence: TTT
  source 1..20: mol_type = other DNA
taccacagtatcacttgtca

SEQ ID NO: 16063 - DNA, 20 bp, synthetic construct
  misc_feature 1..20: note = Description of Artificial Sequence: Synthetic oligonucleotide
  misc_feature 1..20: note = Target: ANGPTL3; (+) strand; PAM type: YTN; PAM sequence: TTT
  source 1..20: mol_type = other DNA
accacagtatcacttgtcag

SEQ ID NO: 16064 - DNA, 20 bp, synthetic construct
  misc_feature 1..20: note = Description of Artificial Sequence: Synthetic oligonucleotide
  misc_feature 1..20: note = Target: ANGPTL3; (+) strand; PAM type: YTN; PAM sequence: TTA
  source 1..20: mol_type = other DNA
ccacagtatcacttgtcaga

SEQ ID NO: 16065 - DNA, 20 bp, synthetic construct
  misc_feature 1..20: note = Description of Artificial Sequence: Synthetic oligonucleotide
  misc_feature 1..20: note = Target: ANGPTL3; (+) strand; PAM type: YTN; PAM sequence: CTT
  source 1..20: mol_type = other DNA
gtcagaatttatttttaaat

SEQ ID NO: 16066 - DNA, 20 bp, synthetic construct
  misc_feature 1..20: note = Description of Artificial Sequence: Synthetic oligonucleotide
  misc_feature 1..20: note = Target: ANGPTL3; (+) strand; PAM type: YTN; PAM sequence: TTG
  source 1..20: mol_type = other DNA
tcagaatttatttttaaata

SEQ ID NO: 16067 - DNA, 20 bp, synthetic construct
  misc_feature 1..20: note = Description of Artificial Sequence: Synthetic oligonucleotide
  misc_feature 1..20: note = Target: ANGPTL3; (+) strand; PAM type: YTN; PAM sequence: TTT
  source 1..20: mol_type = other DNA
atttttaaatatgatttttt

SEQ ID NO: 16068 - DNA, 20 bp, synthetic construct
  misc_feature 1..20: note = Description of Artificial Sequence: Synthetic oligonucleotide
  misc_feature 1..20: note = Target: ANGPTL3; (+) strand; PAM type: YTN; PAM sequence: TTA
  source 1..20: mol_type = other DNA
tttttaaatatgatttttta

SEQ ID NO: 16069 - DNA, 20 bp, synthetic construct
  misc_feature 1..20: note = Description of Artificial Sequence: Synthetic oligonucleotide
  misc_feature 1..20: note = Target: ANGPTL3; (+) strand; PAM type: YTN; PAM sequence: TTT
  source 1..20: mol_type = other DNA
ttaaatatgattttttaaaa

SEQ ID NO: 16070 - DNA, 20 bp, synthetic construct
  misc_feature 1..20: note = Description of Artificial Sequence: Synthetic oligonucleotide
  misc_feature 1..20: note = Target: ANGPTL3; (+) strand; PAM type: YTN; PAM sequence: TTT
  source 1..20: mol_type = other DNA
taaatatgattttttaaaac

SEQ ID NO: 16071 - DNA, 20 bp, synthetic construct
  misc_feature 1..20: note = Description of Artificial Sequence: Synthetic oligonucleotide
  misc_feature 1..20: note = Target: ANGPTL3; (+) strand; PAM type: YTN; PAM sequence: TTT
  source 1..20: mol_type = other DNA
aaatatgattttttaaaact

SEQ ID NO: 16072 - DNA, 20 bp, synthetic construct
  misc_feature 1..20: note = Description of Artificial Sequence: Synthetic oligonucleotide
  misc_feature 1..20: note = Target: ANGPTL3; (+) strand; PAM type: YTN; PAM sequence: TTA
  source 1..20: mol_type = other DNA
aatatgattttttaaaactg

SEQ ID NO: 16073 - DNA, 20 bp, synthetic construct
  misc_feature 1..20: note = Description of Artificial Sequence: Synthetic oligonucleotide
  misc_feature 1..20: note = Target: ANGPTL3; (+) strand; PAM type: YTN; PAM sequence: TTT
  source 1..20: mol_type = other DNA
tttaaaactgccagtaagaa

SEQ ID NO: 16074 - DNA, 20 bp, synthetic construct
  misc_feature 1..20: note = Description of Artificial Sequence: Synthetic oligonucleotide
  misc_feature 1..20: note = Target: ANGPTL3; (+) strand; PAM type: YTN; PAM sequence: TTT
  source 1..20: mol_type = other DNA
ttaaaactgccagtaagaaa

SEQ ID NO: 16075 - DNA, 20 bp, synthetic construct
  misc_feature 1..20: note = Description of Artificial Sequence: Synthetic oligonucleotide
  misc_feature 1..20: note = Target: ANGPTL3; (+) strand; PAM type: YTN; PAM sequence: TTT
  source 1..20: mol_type = other DNA
taaaactgccagtaagaaat

SEQ ID NO: 16076 - DNA, 20 bp, synthetic construct
  misc_feature 1..20: note = Description of Artificial Sequence: Synthetic oligonucleotide
  misc_feature 1..20: note = Target: ANGPTL3; (+) strand; PAM type: YTN; PAM sequence: TTT
  source 1..20: mol_type = other DNA
aaaactgccagtaagaaatt

SEQ ID NO: 16077 - DNA, 20 bp, synthetic construct
  misc_feature 1..20: note = Description of Artificial Sequence: Synthetic oligonucleotide
  misc_feature 1..20: note = Target: ANGPTL3; (+) strand; PAM type: YTN; PAM sequence: TTA
  source 1..20: mol_type = other DNA
aaactgccagtaagaaattt

SEQ ID NO: 16078 - DNA, 20 bp, synthetic construct
  misc_feature 1..20: note = Description of Artificial Sequence: Synthetic oligonucleotide
  misc_feature 1..20: note = Target: ANGPTL3; (+) strand; PAM type: YTN; PAM sequence: CTG
  source 1..20: mol_type = other DNA
ccagtaagaaattttaaatt

SEQ ID NO: 16079 - DNA, 20 bp, synthetic construct
  misc_feature 1..20: note = Description of Artificial Sequence: Synthetic oligonucleotide
  misc_feature 1..20: note = Target: ANGPTL3; (+) strand; PAM type: YTN; PAM sequence: TTT
  source 1..20: mol_type = other DNA
taaattaaacccatttgtta

SEQ ID NO: 16080 - DNA, 20 bp, synthetic construct
  misc_feature 1..20: note = Description of Artificial Sequence: Synthetic oligonucleotide
  misc_feature 1..20: note = Target: ANGPTL3; (+) strand; PAM type: YTN; PAM sequence: TTT
  source 1..20: mol_type = other DNA
aaattaaacccatttgttaa

SEQ ID NO: 16081 - DNA, 20 bp, synthetic construct
  misc_feature 1..20: note = Description of Artificial Sequence: Synthetic oligonucleotide
  misc_feature 1..20: note = Target: ANGPTL3; (+) strand; PAM type: YTN; PAM sequence: TTA
  source 1..20: mol_type = other DNA
aattaaacccatttgttaaa

SEQ ID NO: 16082 - DNA, 20 bp, synthetic construct
  misc_feature 1..20: note = Description of Artificial Sequence: Synthetic oligonucleotide
  misc_feature 1..20: note = Target: ANGPTL3; (+) strand; PAM type: YTN; PAM sequence: TTA
  source 1..20: mol_type = other DNA
aacccatttgttaaaggata

SEQ ID NO: 16083 - DNA, 20 bp, synthetic construct
  misc_feature 1..20: note = Description of Artificial Sequence: Synthetic oligonucleotide
  misc_feature 1..20: note = Target: ANGPTL3; (+) strand; PAM type: YTN; PAM sequence: TTT
  source 1..20: mol_type = other DNA
gttaaaggatatagtgccca

SEQ ID NO: 16084 - DNA, 20 bp, synthetic construct
  misc_feature 1..20: note = Description of Artificial Sequence: Synthetic oligonucleotide
  misc_feature 1..20: note = Target: ANGPTL3; (+) strand; PAM type: YTN; PAM sequence: TTG
  source 1..20: mol_type = other DNA
ttaaaggatatagtgcccaa

SEQ ID NO: 16085 - DNA, 20 bp, synthetic construct
  misc_feature 1..20: note = Description of Artificial Sequence: Synthetic oligonucleotide
  misc_feature 1..20: note = Target: ANGPTL3; (+) strand; PAM type: YTN; PAM sequence: TTA
  source 1..20: mol_type = other DNA
aaggatatagtgcccaagtt

SEQ ID NO: 16086 - DNA, 20 bp, synthetic construct
  misc_feature 1..20: note = Description of Artificial Sequence: Synthetic oligonucleotide
  misc_feature 1..20: note = Target: ANGPTL3; (+) strand; PAM type: YTN; PAM sequence: TTA
  source 1..20: mol_type = other DNA
tatggtgacctacctttgtc

SEQ ID NO: 16087 - DNA, 20 bp, synthetic construct
  misc_feature 1..20: note = Description of Artificial Sequence: Synthetic oligonucleotide
  misc_feature 1..20: note = Target: ANGPTL3; (+) strand; PAM type: YTN; PAM sequence: CTA
  source 1..20: mol_type = other DNA
cctttgtcaatacttagcat

SEQ ID NO: 16088 - DNA, 20 bp, synthetic construct
  misc_feature 1..20: note = Description of Artificial Sequence: Synthetic oligonucleotide
  misc_feature 1..20: note = Target: ANGPTL3; (+) strand; PAM type: YTN; PAM sequence: CTT
  source 1..20: mol_type = other DNA
tgtcaatacttagcattatg

SEQ ID NO: 16089 - DNA, 20 bp, synthetic construct
  misc_feature 1..20: note = Description of Artificial Sequence: Synthetic oligonucleotide
  misc_feature 1..20: note = Target: ANGPTL3; (+) strand; PAM type: YTN; PAM sequence: TTT
  source 1..20: mol_type = other DNA
gtcaatacttagcattatgt

SEQ ID NO: 16090 - DNA, 20 bp, synthetic construct
  misc_feature 1..20: note = Description of Artificial Sequence: Synthetic oligonucleotide
  misc_feature 1..20: note = Target: ANGPTL3; (+) strand; PAM type: YTN; PAM sequence: TTG
  source 1..20: mol_type = other DNA
tcaatacttagcattatgta

SEQ ID NO: 16091 - DNA, 20 bp, synthetic construct
  misc_feature 1..20: note = Description of Artificial Sequence: Synthetic oligonucleotide
  misc_feature 1..20: note = Target: ANGPTL3; (+) strand; PAM type: YTN; PAM sequence: CTT
  source 1..20: mol_type = other DNA
agcattatgtatttcaaatt

SEQ ID NO: 16092 - DNA, 20 bp, synthetic construct
  misc_feature 1..20: note = Description of Artificial Sequence: Synthetic oligonucleotide
  misc_feature 1..20: note = Target: ANGPTL3; (+) strand; PAM type: YTN; PAM sequence: TTA
  source 1..20: mol_type = other DNA
gcattatgtatttcaaatta

SEQ ID NO: 16093 - DNA, 20 bp, synthetic construct
  misc_feature 1..20: note = Description of Artificial Sequence: Synthetic oligonucleotide
  misc_feature 1..20: note = Target: ANGPTL3; (+) strand; PAM type: YTN; PAM sequence: TTA
  source 1..20: mol_type = other DNA
tgtatttcaaattatccaat

SEQ ID NO: 16094 - DNA, 20 bp, synthetic construct
  misc_feature 1..20: note = Description of Artificial Sequence: Synthetic oligonucleotide
  misc_feature 1..20: note = Target: ANGPTL3; (+) strand; PAM type: YTN; PAM sequence: TTT
  source 1..20: mol_type = other DNA
caaattatccaatatacatg

SEQ ID NO: 16095 - DNA, 20 bp, synthetic construct
  misc_feature 1..20: note = Description of Artificial Sequence: Synthetic oligonucleotide
  misc_feature 1..20: note = Target: ANGPTL3; (+) strand; PAM type: YTN; PAM sequence: TTC
  source 1..20: mol_type = other DNA
aaattatccaatatacatgt

SEQ ID NO: 16096 - DNA, 20 bp, synthetic construct
  misc_feature 1..20: note = Description of Artificial Sequence: Synthetic oligonucleotide
  misc_feature 1..20: note = Target: ANGPTL3; (+) strand; PAM type: YTN; PAM sequence: TTA
  source 1..20: mol_type = other DNA
tccaatatacatgtcatata

SEQ ID NO: 16097 - DNA, 20 bp, synthetic construct
  misc_feature 1..20: note = Description of Artificial Sequence: Synthetic oligonucleotide
  misc_feature 1..20: note = Target: ANGPTL3; (+) strand; PAM type: YTN; PAM sequence: TTT
  source 1..20: mol_type = other DNA
ttatatgtcacatatataaa

SEQ ID NO: 16098 - DNA, 20 bp, synthetic construct
  misc_feature 1..20: note = Description of Artificial Sequence: Synthetic oligonucleotide
  misc_feature 1..20: note = Target: ANGPTL3; (+) strand; PAM type: YTN; PAM sequence: TTT
  source 1..20: mol_type = other DNA
tatatgtcacatatataaaa

SEQ ID NO: 16099 - DNA, 20 bp, synthetic construct
  misc_feature 1..20: note = Description of Artificial Sequence: Synthetic oligonucleotide
  misc_feature 1..20: note = Target: ANGPTL3; (+) strand; PAM type: YTN; PAM sequence: TTT
  source 1..20: mol_type = other DNA
atatgtcacatatataaaag

SEQ ID NO: 16100 - DNA, 20 bp, synthetic construct
  misc_feature 1..20: note = Description of Artificial Sequence: Synthetic oligonucleotide
  misc_feature 1..20: note = Target: ANGPTL3; (+) strand; PAM type: YTN; PAM sequence: TTA
  source 1..20: mol_type = other DNA
tatgtcacatatataaaaga

SEQ ID NO: 16101 - DNA, 20 bp, synthetic construct
  misc_feature 1..20: note = Description of Artificial Sequence: Synthetic oligonucleotide
  misc_feature 1..20: note = Target: ANGPTL3; (+) strand; PAM type: YTN; PAM sequence: CTA
  source 1..20: mol_type = other DNA
tgtgaatcctaagtaaatat

SEQ ID NO: 16102 - DNA, 20 bp, synthetic construct
  misc_feature 1..20: note = Description of Artificial Sequence: Synthetic oligonucleotide
  misc_feature 1..20: note = Target: ANGPTL3; (+) strand; PAM type: YTN; PAM sequence: CTA
  source 1..20: mol_type = other DNA
agtaaatattttgttccaga

SEQ ID NO: 16103 - DNA, 20 bp, synthetic construct
  misc_feature 1..20: note = Description of Artificial Sequence: Synthetic oligonucleotide
  misc_feature 1..20: note = Target: ANGPTL3; (+) strand; PAM type: YTN; PAM sequence: TTT
  source 1..20: mol_type = other DNA
tgttccagaaaagtacaaaa

SEQ ID NO: 16104 - DNA, 20 bp, synthetic construct
  misc_feature 1..20: note = Description of Artificial Sequence: Synthetic oligonucleotide
  misc_feature 1..20: note = Target: ANGPTL3; (+) strand; PAM type: YTN; PAM sequence: TTT
  source 1..20: mol_type = other DNA
gttccagaaaagtacaaaat

SEQ ID NO: 16105 - DNA, 20 bp, synthetic construct
  misc_feature 1..20: note = Description of Artificial Sequence: Synthetic oligonucleotide
  misc_feature 1..20: note = Target: ANGPTL3; (+) strand; PAM type: YTN; PAM sequence: TTG
  source 1..20: mol_type = other DNA
ttccagaaaagtacaaaata

SEQ ID NO: 16106 - DNA, 20 bp, synthetic construct
  misc_feature 1..20: note = Description of Artificial Sequence: Synthetic oligonucleotide
  misc_feature 1..20: note = Target: ANGPTL3; (+) strand; PAM type: YTN; PAM sequence: TTC
  source 1..20: mol_type = other DNA
cagaaaagtacaaaataata

SEQ ID NO: 16107 - DNA, 20 bp, synthetic construct
  misc_feature 1..20: note = Description of Artificial Sequence: Synthetic oligonucleotide
  misc_feature 1..20: note = Target: ANGPTL3; (+) strand; PAM type: YTN; PAM sequence: CTA
  source 1..20: mol_type = other DNA
taattttcaggaccacagac

SEQ ID NO: 16108 - DNA, 20 bp, synthetic construct
  misc_feature 1..20: note = Description of Artificial Sequence: Synthetic oligonucleotide
  misc_feature 1..20: note = Target: ANGPTL3; (+) strand; PAM type: YTN; PAM sequence: TTT
  source 1..20: mol_type = other DNA
tcaggaccacagactaagct

SEQ ID NO: 16109 - DNA, 20 bp, synthetic construct
  misc_feature 1..20: note = Description of Artificial Sequence: Synthetic oligonucleotide
  misc_feature 1..20: note = Target: ANGPTL3; (+) strand; PAM type: YTN; PAM sequence: TTT
  source 1..20: mol_type = other DNA
caggaccacagactaagctg

SEQ ID NO: 16110 - DNA, 20 bp, synthetic construct
  misc_feature 1..20: note = Description of Artificial Sequence: Synthetic oligonucleotide
  misc_feature 1..20: note = Target: ANGPTL3; (+) strand; PAM type: YTN; PAM sequence: TTC
  source 1..20: mol_type = other DNA
aggaccacagactaagctgt

SEQ ID NO: 16111 - DNA, 20 bp, synthetic construct
  misc_feature 1..20: note = Description of Artificial Sequence: Synthetic oligonucleotide
  misc_feature 1..20: note = Target: ANGPTL3; (+) strand; PAM type: YTN; PAM sequence: CTA
  source 1..20: mol_type = other DNA
agctgtcgaaattaacgctg

SEQ ID NO: 16112 - DNA, 20 bp, synthetic construct
  misc_feature 1..20: note = Description of Artificial Sequence: Synthetic oligonucleotide
  misc_feature 1..20: note = Target: ANGPTL3; (+) strand; PAM type: YTN; PAM sequence: CTG
  source 1..20: mol_type = other DNA
tcgaaattaacgctgatttt

SEQ ID NO: 16113 - DNA, 20 bp, synthetic construct
  misc_feature 1..20: note = Description of Artificial Sequence: Synthetic oligonucleotide
  misc_feature 1..20: note = Target: ANGPTL3; (+) strand; PAM type: YTN; PAM sequence: TTA
  source 1..20: mol_type = other DNA
acgctgatttttttagggcc

SEQ ID NO: 16114 - DNA, 20 bp, synthetic construct
  misc_feature 1..20: note = Description of Artificial Sequence: Synthetic oligonucleotide
  misc_feature 1..20: note = Target: ANGPTL3; (+) strand; PAM type: YTN; PAM sequence: CTG
  source 1..20: mol_type = other DNA
atttttttagggccagaata

SEQ ID NO: 16115 - DNA, 20 bp, synthetic construct
  misc_feature 1..20: note = Description of Artificial Sequence: Synthetic oligonucleotide
  misc_feature 1..20: note = Target: ANGPTL3; (+) strand; PAM type: YTN; PAM sequence: TTT
  source 1..20: mol_type = other DNA
ttttagggccagaataccaa

SEQ ID NO: 16116 - DNA, 20 bp, synthetic construct
  misc_feature 1..20: note = Description of Artificial Sequence: Synthetic oligonucleotide
  misc_feature 1..20: note = Target: ANGPTL3; (+) strand; PAM type: YTN; PAM sequence: TTT
  source 1..20: mol_type = other DNA
tttagggccagaataccaaa

SEQ ID NO: 16117 - DNA, 20 bp, synthetic construct
  misc_feature 1..20: note = Description of Artificial Sequence: Synthetic oligonucleotide
  misc_feature 1..20: note = Target: ANGPTL3; (+) strand; PAM type: YTN; PAM sequence: TTT
  source 1..20: mol_type = other DNA
ttagggccagaataccaaaa

SEQ ID NO: 16118 - DNA, 20 bp, synthetic construct
  misc_feature 1..20: note = Description of Artificial Sequence: Synthetic oligonucleotide
  misc_feature 1..20: note = Target: ANGPTL3; (+) strand; PAM type: YTN; PAM sequence: TTT
  source 1..20: mol_type = other DNA
tagggccagaataccaaaat

SEQ ID NO: 16119 - DNA, 20 bp, synthetic construct
  misc_feature 1..20: note = Description of Artificial Sequence: Synthetic oligonucleotide
  misc_feature 1..20: note = Target: ANGPTL3; (+) strand; PAM type: YTN; PAM sequence: TTT
  source 1..20: mol_type = other DNA
agggccagaataccaaaatg

SEQ ID NO: 16120 - DNA, 20 bp, synthetic construct
  misc_feature 1..20: note = Description of Artificial Sequence: Synthetic oligonucleotide
  misc_feature 1..20: note = Target: ANGPTL3; (+) strand; PAM type: YTN; PAM sequence: TTA
  source 1..20: mol_type = other DNA
gggccagaataccaaaatgg

SEQ ID NO: 16121 - DNA, 20 bp, synthetic construct
  misc_feature 1..20: note = Description of Artificial Sequence: Synthetic oligonucleotide
  misc_feature 1..20: note = Target: ANGPTL3; (+) strand; PAM type: YTN; PAM sequence: CTC
  source 1..20: mol_type = other DNA
ctctcttcccccaaaattgg

SEQ ID NO: 16122 - DNA, 20 bp, synthetic construct
  misc_feature 1..20: note = Description of Artificial Sequence: Synthetic oligonucleotide
  misc_feature 1..20: note = Target: ANGPTL3; (+) strand; PAM type: YTN; PAM sequence: CTC
  source 1..20: mol_type = other DNA
tcttcccccaaaattggaca

SEQ ID NO: 16123 - DNA, 20 bp, synthetic construct
  misc_feature 1..20: note = Description of Artificial Sequence: Synthetic oligonucleotide
  misc_feature 1..20: note = Target: ANGPTL3; (+) strand; PAM type: YTN; PAM sequence: CTC
  source 1..20: mol_type = other DNA
ttcccccaaaattggacaat

SEQ ID NO: 16124 - DNA, 20 bp, synthetic construct
  misc_feature 1..20: note = Description of Artificial Sequence: Synthetic oligonucleotide
  misc_feature 1..20: note = Target: ANGPTL3; (+) strand; PAM type: YTN; PAM sequence: CTT
  source 1..20: mol_type = other DNA
cccccaaaattggacaattt

SEQ ID NO: 16125 - DNA, 20 bp, synthetic construct
  misc_feature 1..20: note = Description of Artificial Sequence: Synthetic oligonucleotide
  misc_feature 1..20: note = Target: ANGPTL3; (+) strand; PAM type: YTN; PAM sequence: TTC
  source 1..20: mol_type = other DNA
ccccaaaattggacaatttc

SEQ ID NO: 16126 - DNA, 20 bp, synthetic construct
  misc_feature 1..20: note = Description of Artificial Sequence: Synthetic oligonucleotide
  misc_feature 1..20: note = Target: ANGPTL3; (+) strand; PAM type: YTN; PAM sequence: TTG
  source 1..20: mol_type = other DNA
gacaatttcaaatgcaaaat

SEQ ID NO: 16127 - DNA, 20 bp, synthetic construct
  misc_feature 1..20: note = Description of Artificial Sequence: Synthetic oligonucleotide
  misc_feature 1..20: note = Target: ANGPTL3; (+) strand; PAM type: YTN; PAM sequence: TTT
  source 1..20: mol_type = other DNA
caaatgcaaaataattcatt

SEQ ID NO: 16128 - DNA, 20 bp, synthetic construct
  misc_feature 1..20: note = Description of Artificial Sequence: Synthetic oligonucleotide
  misc_feature 1..20: note = Target: ANGPTL3; (+) strand; PAM type: YTN; PAM sequence: TTC
  source 1..20: mol_type = other DNA
aaatgcaaaataattcatta

SEQ ID NO: 16129 - DNA, 20 bp, synthetic construct
  misc_feature 1..20: note = Description of Artificial Sequence: Synthetic oligonucleotide
  misc_feature 1..20: note = Target: ANGPTL3; (+) strand; PAM type: YTN; PAM sequence: TTC
  source 1..20: mol_type = other DNA
attatttaatatatgagttg

SEQ ID NO: 16130 - DNA, 20 bp, synthetic construct
  misc_feature 1..20: note = Description of Artificial Sequence: Synthetic oligonucleotide
  misc_feature 1..20: note = Target: ANGPTL3; (+) strand; PAM type: YTN; PAM sequence: TTA
  source 1..20: mol_type = other DNA
tttaatatatgagttgcttc

SEQ ID NO: 16131 - DNA, 20 bp, synthetic construct
  misc_feature 1..20: note = Description of Artificial Sequence: Synthetic oligonucleotide
  misc_feature 1..20: note = Target: ANGPTL3; (+) strand; PAM type: YTN; PAM sequence: TTT
  source 1..20: mol_type = other DNA
aatatatgagttgcttcctc

SEQ ID NO: 16132 - DNA, 20 bp, synthetic construct
  misc_feature 1..20: note = Description of Artificial Sequence: Synthetic oligonucleotide
  misc_feature 1..20: note = Target: ANGPTL3; (+) strand; PAM type: YTN; PAM sequence: TTA
  source 1..20: mol_type = other DNA
atatatgagttgcttcctct

SEQ ID NO: 16133 - DNA, 20 bp, synthetic construct
  misc_feature 1..20: note = Description of Artificial Sequence: Synthetic oligonucleotide
  misc_feature 1..20: note = Target: ANGPTL3; (+) strand; PAM type: YTN; PAM sequence: TTG
  source 1..20: mol_type = other DNA
cttcctctatttggtttcct

SEQ ID NO: 16134 - DNA, 20 bp, synthetic construct
  misc_feature 1..20: note = Description of Artificial Sequence: Synthetic oligonucleotide
  misc_feature 1..20: note = Target: ANGPTL3; (+) strand; PAM type: YTN; PAM sequence: CTT
  source 1..20: mol_type = other DNA
cctctatttggtttccttaa

SEQ ID NO: 16135 - DNA, 20 bp, synthetic construct
  misc_feature 1..20: note = Description of Artificial Sequence: Synthetic oligonucleotide
  misc_feature 1..20: note = Target: ANGPTL3; (+) strand; PAM type: YTN; PAM sequence: TTC
  source 1..20: mol_type = other DNA
ctctatttggtttccttaaa

SEQ ID NO: 16136 - DNA, 20 bp, synthetic construct
  misc_feature 1..20: note = Description of Artificial Sequence: Synthetic oligonucleotide
  misc_feature 1..20: note = Target: ANGPTL3; (+) strand; PAM type: YTN; PAM sequence: CTC
  source 1..20: mol_type = other DNA
tatttggtttccttaaaaaa

SEQ ID NO: 16137 - DNA, 20 bp, synthetic construct
  misc_feature 1..20: note = Description of Artificial Sequence: Synthetic oligonucleotide
  misc_feature 1..20: note = Target: ANGPTL3; (+) strand; PAM type: YTN; PAM sequence: CTA
  source 1..20: mol_type = other DNA
tttggtttccttaaaaaaaa

SEQ ID NO: 16138 - DNA, 20 bp, synthetic construct
  misc_feature 1..20: note = Description of Artificial Sequence: Synthetic oligonucleotide
  misc_feature 1..20: note = Target: ANGPTL3; (+) strand; PAM type: YTN; PAM sequence: TTT
  source 1..20: mol_type = other DNA
ggtttccttaaaaaaaaaaa

SEQ ID NO: 16139 - DNA, 20 bp, synthetic construct
  misc_feature 1..20: note = Description of Artificial Sequence: Synthetic oligonucleotide
  misc_feature 1..20: note = Target: ANGPTL3; (+) strand; PAM type: YTN; PAM sequence: TTG
  source 1..20: mol_type = other DNA
gtttccttaaaaaaaaaaaa

SEQ ID NO: 16140 - DNA, 20 bp, synthetic construct
  misc_feature 1..20: note = Description of Artificial Sequence: Synthetic oligonucleotide
  misc_feature 1..20: note = Target: ANGPTL3; (+) strand; PAM type: YTN; PAM sequence: TTT
  source 1..20: mol_type = other DNA
ccttaaaaaaaaaaaaaact

SEQ ID NO: 16141 - DNA, 20 bp, synthetic construct
  misc_feature 1..20: note = Description of Artificial Sequence: Synthetic oligonucleotide
  misc_feature 1..20: note = Target: ANGPTL3; (+) strand; PAM type: YTN; PAM sequence: TTC
  source 1..20: mol_type = other DNA
cttaaaaaaaaaaaaaactc

SEQ ID NO: 16142 - DNA, 20 bp, synthetic construct
  misc_feature 1..20: note = Description of Artificial Sequence: Synthetic oligonucleotide
  misc_feature 1..20: note = Target: ANGPTL3; (+) strand; PAM type: YTN; PAM sequence: CTT
  source 1..20: mol_type = other DNA
aaaaaaaaaaaaaactctca

SEQ ID NO: 16143 - DNA, 20 bp, synthetic construct
  misc_feature 1..20: note = Description of Artificial Sequence: Synthetic oligonucleotide
  misc_feature 1..20: note = Target: ANGPTL3; (+) strand; PAM type: YTN; PAM sequence: TTA
  source 1..20: mol_type = other DNA
aaaaaaaaaaaaactctcat

SEQ ID NO: 16144 - DNA, 20 bp, synthetic construct
  misc_feature 1..20: note = Description of Artificial Sequence: Synthetic oligonucleotide
  misc_feature 1..20: note = Target: ANGPTL3; (+) strand; PAM type: YTN; PAM sequence: CTC
  source 1..20: mol_type = other DNA
tcataggacatgtttcattt

SEQ ID NO: 16145 - DNA, 20 bp, synthetic construct
  misc_feature 1..20: note = Description of Artificial Sequence: Synthetic oligonucleotide
  misc_feature 1..20: note = Target: ANGPTL3; (+) strand; PAM type: YTN; PAM sequence: CTC
  source 1..20: mol_type = other DNA
ataggacatgtttcattttg

SEQ ID NO: 16146 - DNA, 20 bp, synthetic construct
  misc_feature 1..20: note = Description of Artificial Sequence: Synthetic oligonucleotide
  misc_feature 1..20: note = Target: ANGPTL3; (+) strand; PAM type: YTN; PAM sequence: TTT
  source 1..20: mol_type = other DNA
cattttgttcctttcaggag

SEQ ID NO: 16147 - DNA, 20 bp, synthetic construct
  misc_feature 1..20: note = Description of Artificial Sequence: Synthetic oligonucleotide
  misc_feature 1..20: note = Target: ANGPTL3; (+) strand; PAM type: YTN; PAM sequence: TTC
  source 1..20: mol_type = other DNA
attttgttcctttcaggagt

SEQ ID NO: 16148 - DNA, 20 bp, synthetic construct
  misc_feature 1..20: note = Description of Artificial Sequence: Synthetic oligonucleotide
  misc_feature 1..20: note = Target: ANGPTL3; (+) strand; PAM type: YTN; PAM sequence: TTT
  source 1..20: mol_type = other DNA
tgttcctttcaggagtagta

SEQ ID NO: 16149 - DNA, 20 bp, synthetic construct
  misc_feature 1..20: note = Description of Artificial Sequence: Synthetic oligonucleotide
  misc_feature 1..20: note = Target: ANGPTL3; (+) strand; PAM type: YTN; PAM sequence: TTT
  source 1..20: mol_type = other DNA
gttcctttcaggagtagtaa

SEQ ID NO: 16150 - DNA, 20 bp, synthetic construct
  misc_feature 1..20: note = Description of Artificial Sequence: Synthetic oligonucleotide
  misc_feature 1..20: note = Target: ANGPTL3; (+) strand; PAM type: YTN; PAM sequence: TTG
  source 1..20: mol_type = other DNA
ttcctttcaggagtagtaaa

SEQ ID NO: 16151 - DNA, 20 bp, synthetic construct
  misc_feature 1..20: note = Description of Artificial Sequence: Synthetic oligonucleotide
  misc_feature 1..20: note = Target: ANGPTL3; (+) strand; PAM type: YTN; PAM sequence: TTC
  source 1..20: mol_type = other DNA
ctttcaggagtagtaaatta

SEQ ID NO: 16152 - DNA, 20 bp, synthetic construct
  misc_feature 1..20: note = Description of Artificial Sequence: Synthetic oligonucleotide
  misc_feature 1..20: note = Target: ANGPTL3; (+) strand; PAM type: YTN; PAM sequence: CTT
  source 1..20: mol_type = other DNA
tcaggagtagtaaattagac

SEQ ID NO: 16153 - DNA, 20 bp, synthetic construct
  misc_feature 1..20: note = Description of Artificial Sequence: Synthetic oligonucleotide
  misc_feature 1..20: note = Target: ANGPTL3; (+) strand; PAM type: YTN; PAM sequence: TTT
  source 1..20: mol_type = other DNA
caggagtagtaaattagacg

SEQ ID NO: 16154 - DNA, 20 bp, synthetic construct
  misc_feature 1..20: note = Description of Artificial Sequence: Synthetic oligonucleotide
  misc_feature 1..20: note = Target: ANGPTL3; (+) strand; PAM type: YTN; PAM sequence: TTC
  source 1..20: mol_type = other DNA
aggagtagtaaattagacgt

SEQ ID NO: 16155 - DNA, 20 bp, synthetic construct
  misc_feature 1..20: note = Description of Artificial Sequence: Synthetic oligonucleotide
  misc_feature 1..20: note = Target: ANGPTL3; (+) strand; PAM type: YTN; PAM sequence: TTA
  source 1..20: mol_type = other DNA
gacgttttccccatataaag

SEQ ID NO: 16156 - DNA, 20 bp, synthetic construct
  misc_feature 1..20: note = Description of Artificial Sequence: Synthetic oligonucleotide
  misc_feature 1..20: note = Target: ANGPTL3; (+) strand; PAM type: YTN; PAM sequence: TTT
  source 1..20: mol_type = other DNA
tccccatataaagctttttt

SEQ ID NO: 16157 - DNA, 20 bp, synthetic construct
  misc_feature 1..20: note = Description of Artificial Sequence: Synthetic oligonucleotide
  misc_feature 1..20: note = Target: ANGPTL3; (+) strand; PAM type: YTN; PAM sequence: TTT
  source 1..20: mol_type = other DNA
ccccatataaagcttttttc

SEQ ID NO: 16158 - DNA, 20 bp, synthetic construct
  misc_feature 1..20: note = Description of Artificial Sequence: Synthetic oligonucleotide
  misc_feature 1..20: note = Target: ANGPTL3; (+) strand; PAM type: YTN; PAM sequence: TTC
  source 1..20: mol_type = other DNA
cccatataaagcttttttct

SEQ ID NO: 16159 - DNA, 20 bp, synthetic construct
  misc_feature 1..20: note = Description of Artificial Sequence: Synthetic oligonucleotide
  misc_feature 1..20: note = Target: ANGPTL3; (+) strand; PAM type: YTN; PAM sequence: CTT
  source 1..20: mol_type = other DNA
ttttctaccagaaagatact

SEQ ID NO: 16160 - DNA, 20 bp, synthetic construct
  misc_feature 1..20: note = Description of Artificial Sequence: Synthetic oligonucleotide
  misc_feature 1..20: note = Target: ANGPTL3; (+) strand; PAM type: YTN; PAM sequence: TTT
  source 1..20: mol_type = other DNA
tttctaccagaaagatactt

SEQ ID NO: 16161 - DNA, 20 bp, synthetic construct
  misc_feature 1..20: note = Description of Artificial Sequence: Synthetic oligonucleotide
  misc_feature 1..20: note = Target: ANGPTL3; (+) strand; PAM type: YTN; PAM sequence: TTT
  source 1..20: mol_type = other DNA
ttctaccagaaagatacttc

SEQ ID NO: 16162 - DNA, 20 bp, synthetic construct
  misc_feature 1..20: note = Description of Artificial Sequence: Synthetic oligonucleotide
  misc_feature 1..20: note = Target: ANGPTL3; (+) strand; PAM type: YTN; PAM sequence: TTT
  source 1..20: mol_type = other DNA
tctaccagaaagatacttct

SEQ ID NO: 16163 - DNA, 20 bp, synthetic construct
  misc_feature 1..20: note = Description of Artificial Sequence: Synthetic oligonucleotide
  misc_feature 1..20: note = Target: ANGPTL3; (+) strand; PAM type: YTN; PAM sequence: TTT
  source 1..20: mol_type = other DNA
ctaccagaaagatacttctg

SEQ ID NO: 16164 - DNA, 20 bp, synthetic construct
  misc_feature 1..20: note = Description of Artificial Sequence: Synthetic oligonucleotide
  misc_feature 1..20: note = Target: ANGPTL3; (+) strand; PAM type: YTN; PAM sequence: TTC
  source 1..20: mol_type = other DNA
taccagaaagatacttctgg

SEQ ID NO: 16165 - DNA, 20 bp, synthetic construct
  misc_feature 1..20: note = Description of Artificial Sequence: Synthetic oligonucleotide
  misc_feature 1..20: note = Target: ANGPTL3; (+) strand; PAM type: YTN; PAM sequence: CTA
  source 1..20: mol_type = other DNA
ccagaaagatacttctggta

SEQ ID NO: 16166 - DNA, 20 bp, synthetic construct
  misc_feature 1..20: note = Description of Artificial Sequence: Synthetic oligonucleotide
  misc_feature 1..20: note = Target: ANGPTL3; (+) strand; PAM type: YTN; PAM sequence: CTT
  source 1..20: mol_type = other DNA
ctggtagaagaagagaaagg

SEQ ID NO: 16167 - DNA, 20 bp, synthetic construct
  misc_feature 1..20: note = Description of Artificial Sequence: Synthetic oligonucleotide
  misc_feature 1..20: note = Target: ANGPTL3; (+) strand; PAM type: YTN; PAM sequence: TTC
  source 1..20: mol_type = other DNA
tggtagaagaagagaaagga

SEQ ID NO: 16168 - DNA, 20 bp, synthetic construct
  misc_feature 1..20: note = Description of Artificial Sequence: Synthetic oligonucleotide
  misc_feature 1..20: note = Target: ANGPTL3; (+) strand; PAM type: YTN; PAM sequence: CTG
  source 1..20: mol_type = other DNA
gtagaagaagagaaaggagc

SEQ ID NO: 16169 - DNA, 20 bp, synthetic construct
  misc_feature 1..20: note = Description of Artificial Sequence: Synthetic oligonucleotide
  misc_feature 1..20: note = Target: ANGPTL3; (+) strand; PAM type: YTN; PAM sequence: CTC
  source 1..20: mol_type = other DNA
tttatggttcacacgactgt

SEQ ID NO: 16170 - DNA, 20 bp, synthetic construct
  misc_feature 1..20: note = Description of Artificial Sequence: Synthetic oligonucleotide
  misc_feature 1..20: note = Target: ANGPTL3; (+) strand; PAM type: YTN; PAM sequence: CTT
  source 1..20: mol_type = other DNA
tatggttcacacgactgtct

SEQ ID NO: 16171 - DNA, 20 bp, synthetic construct
  misc_feature 1..20: note = Description of Artificial Sequence: Synthetic oligonucleotide
  misc_feature 1..20: note = Target: ANGPTL3; (+) strand; PAM type: YTN; PAM sequence: TTT
  source 1..20: mol_type = other DNA
atggttcacacgactgtctc

SEQ ID NO: 16172 - DNA, 20 bp, synthetic construct
  misc_feature 1..20: note = Description of Artificial Sequence: Synthetic oligonucleotide
  misc_feature 1..20: note = Target: ANGPTL3; (+) strand; PAM type: YTN; PAM sequence: TTA
  source 1..20: mol_type = other DNA
tggttcacacgactgtctcc

SEQ ID NO: 16173 - DNA, 20 bp, synthetic construct
  misc_feature 1..20: note = Description of Artificial Sequence: Synthetic oligonucleotide
  misc_feature 1..20: note = Target: ANGPTL3; (+) strand; PAM type: YTN; PAM sequence: TTC
  source 1..20: mol_type = other DNA
acacgactgtctcctgtcct

SEQ ID NO: 16174 - DNA, 20 bp, synthetic construct
  misc_feature 1..20: note = Description of Artificial Sequence: Synthetic oligonucleotide
  misc_feature 1..20: note = Target: ANGPTL3; (+) strand; PAM type: YTN; PAM sequence: CTG
  source 1..20: mol_type = other DNA
tctcctgtcctaactacttt

SEQ ID NO: 16175 - DNA, 20 bp, synthetic construct
  misc_feature 1..20: note = Description of Artificial Sequence: Synthetic oligonucleotide
  misc_feature 1..20: note = Target: ANGPTL3; (+) strand; PAM type: YTN; PAM sequence: CTC
  source 1..20: mol_type = other DNA
ctgtcctaactactttgctt

SEQ ID NO: 16176 - DNA, 20 bp, synthetic construct
  misc_feature 1..20: note = Description of Artificial Sequence: Synthetic oligonucleotide
  misc_feature 1..20: note = Target: ANGPTL3; (+) strand; PAM type: YTN; PAM sequence: CTG
  source 1..20: mol_type = other DNA
tcctaactactttgcttaaa

SEQ ID NO: 16177 - DNA, 20 bp, synthetic construct
  misc_feature 1..20: note = Description of Artificial Sequence: Synthetic oligonucleotide
  misc_feature 1..20: note = Target: ANGPTL3; (+) strand; PAM type: YTN; PAM sequence: CTA
  source 1..20: mol_type = other DNA
actactttgcttaaagtgct

SEQ ID NO: 16178 - DNA, 20 bp, synthetic construct
  misc_feature 1..20: note = Description of Artificial Sequence: Synthetic oligonucleotide
  misc_feature 1..20: note = Target: ANGPTL3; (+) strand; PAM type: YTN; PAM sequence: CTA
  source 1..20: mol_type = other DNA
ctttgcttaaagtgctcaaa

SEQ ID NO: 16179 - DNA, 20 bp, synthetic construct
  misc_feature 1..20: note = Description of Artificial Sequence: Synthetic oligonucleotide
  misc_feature 1..20: note = Target: ANGPTL3; (+) strand; PAM type: YTN; PAM sequence: CTT
  source 1..20: mol_type = other DNA
tgcttaaagtgctcaaattc

SEQ ID NO: 16180 - DNA, 20 bp, synthetic construct
  misc_feature 1..20: note = Description of Artificial Sequence: Synthetic oligonucleotide
  misc_feature 1..20: note = Target: ANGPTL3; (+) strand; PAM type: YTN; PAM sequence: TTT
  source 1..20: mol_type = other DNA
gcttaaagtgctcaaattcc

SEQ ID NO: 16181 - DNA, 20 bp, synthetic construct
  misc_feature 1..20: note = Description of Artificial Sequence: Synthetic oligonucleotide
  misc_feature 1..20: note = Target: ANGPTL3; (+) strand; PAM type: YTN; PAM sequence: TTG
  source 1..20: mol_type = other DNA
cttaaagtgctcaaattcca

SEQ ID NO: 16182 - DNA, 20 bp, synthetic construct
  misc_feature 1..20: note = Description of Artificial Sequence: Synthetic oligonucleotide
  misc_feature 1..20: note = Target: ANGPTL3; (+) strand; PAM type: YTN; PAM sequence: CTT
  source 1..20: mol_type = other DNA
aaagtgctcaaattccatca

SEQ ID NO: 16183 - DNA, 20 bp, synthetic construct
  misc_feature 1..20: note = Description of Artificial Sequence: Synthetic oligonucleotide
  misc_feature 1..20: note = Target: ANGPTL3; (+) strand; PAM type: YTN; PAM sequence: TTA
  source 1..20: mol_type = other DNA
aagtgctcaaattccatcac

SEQ ID NO: 16184 - DNA, 20 bp, synthetic construct
  misc_feature 1..20: note = Description of Artificial Sequence: Synthetic oligonucleotide
  misc_feature 1..20: note = Target: ANGPTL3; (+) strand; PAM type: YTN; PAM sequence: CTC
  source 1..20: mol_type = other DNA
aaattccatcactactcaca

SEQ ID NO: 16185 - DNA, 20 bp, synthetic construct
  misc_feature 1..20: note = Description of Artificial Sequence: Synthetic oligonucleotide
  misc_feature 1..20: note = Target: ANGPTL3; (+) strand; PAM type: YTN; PAM sequence: TTC
  source 1..20: mol_type = other DNA
catcactactcacagttgtc

SEQ ID NO: 16186 - DNA, 20 bp, synthetic construct
  misc_feature 1..20: note = Description of Artificial Sequence: Synthetic oligonucleotide
  misc_feature 1..20: note = Target: ANGPTL3; (+) strand; PAM type: YTN; PAM sequence: CTA
  source 1..20: mol_type = other DNA
ctcacagttgtctaatctaa

SEQ ID NO: 16187 - DNA, 20 bp, synthetic construct
  misc_feature 1..20: note = Description of Artificial Sequence: Synthetic oligonucleotide
  misc_feature 1..20: note = Target: ANGPTL3; (+) strand; PAM type: YTN; PAM sequence: CTC
  source 1..20: mol_type = other DNA
acagttgtctaatctaagtc

SEQ ID NO: 16188 - DNA, 20 bp, synthetic construct
  misc_feature 1..20: note = Description of Artificial Sequence: Synthetic oligonucleotide
  misc_feature 1..20: note = Target: ANGPTL3; (+) strand; PAM type: YTN; PAM sequence: TTG
  source 1..20: mol_type = other DNA
tctaatctaagtctaatccc

SEQ ID NO: 16189 - DNA, 20 bp, synthetic construct
  misc_feature 1..20: note = Description of Artificial Sequence: Synthetic oligonucleotide
  misc_feature 1..20: note = Target: ANGPTL3; (+) strand; PAM type: YTN; PAM sequence: CTA
  source 1..20: mol_type = other DNA
atctaagtctaatccccttt

SEQ ID NO: 16190 - DNA, 20 bp, synthetic construct
  misc_feature 1..20: note = Description of Artificial Sequence: Synthetic oligonucleotide
  misc_feature 1..20: note = Target: ANGPTL3; (+) strand; PAM type: YTN; PAM sequence: CTA
  source 1..20: mol_type = other DNA
agtctaatcccctttgatct

SEQ ID NO: 16191 - DNA, 20 bp, synthetic construct
  misc_feature 1..20: note = Description of Artificial Sequence: Synthetic oligonucleotide
  misc_feature 1..20: note = Target: ANGPTL3; (+) strand; PAM type: YTN; PAM sequence: CTA
  source 1..20: mol_type = other DNA
atcccctttgatctctcaga

SEQ ID NO: 16192 - DNA, 20 bp, synthetic construct
  misc_feature 1..20: note = Description of Artificial Sequence: Synthetic oligonucleotide
  misc_feature 1..20: note = Target: ANGPTL3; (+) strand; PAM type: YTN; PAM sequence: CTT
  source 1..20: mol_type = other DNA
tgatctctcagactaccttc

SEQ ID NO: 16193 - DNA, 20 bp, synthetic construct
  misc_feature 1..20: note = Description of Artificial Sequence: Synthetic oligonucleotide
  misc_feature 1..20: note = Target: ANGPTL3; (+) strand; PAM type: YTN; PAM sequence: TTT
  source 1..20: mol_type = other DNA
gatctctcagactaccttcc

SEQ ID NO: 16194 - DNA, 20 bp, synthetic construct
  misc_feature 1..20: note = Description of Artificial Sequence: Synthetic oligonucleotide
  misc_feature 1..20: note = Target: ANGPTL3; (+) strand; PAM type: YTN; PAM sequence: TTG
  source 1..20: mol_type = other DNA
atctctcagactaccttccc

SEQ ID NO: 16195 - DNA, 20 bp, synthetic construct
  misc_feature 1..20: note = Description of Artificial Sequence: Synthetic oligonucleotide
  misc_feature 1..20: note = Target: ANGPTL3; (+) strand; PAM type: YTN; PAM sequence: CTC
  source 1..20: mol_type = other DNA
tcagactaccttccctttta

SEQ ID NO: 16196 - DNA, 20 bp, synthetic construct
  misc_feature 1..20: note = Description of Artificial Sequence: Synthetic oligonucleotide
  misc_feature 1..20: note = Target: ANGPTL3; (+) strand; PAM type: YTN; PAM sequence: CTC
  source 1..20: mol_type = other DNA
agactaccttcccttttatc

SEQ ID NO: 16197 - DNA, 20 bp, synthetic construct
  misc_feature 1..20: note = Description of Artificial Sequence: Synthetic oligonucleotide
  misc_feature 1..20: note = Target: ANGPTL3; (+) strand; PAM type: YTN; PAM sequence: CTA
  source 1..20: mol_type = other DNA
ccttcccttttatctctcta

SEQ ID NO: 16198 - DNA, 20 bp, synthetic construct
  misc_feature 1..20: note = Description of Artificial Sequence: Synthetic oligonucleotide
  misc_feature 1..20: note = Target: ANGPTL3; (+) strand; PAM type: YTN; PAM sequence: CTT
  source 1..20: mol_type = other DNA
cccttttatctctctactac

SEQ ID NO: 16199 - DNA, 20 bp, synthetic construct
  misc_feature 1..20: note = Description of Artificial Sequence: Synthetic oligonucleotide
  misc_feature 1..20: note = Target: ANGPTL3; (+) strand; PAM type: YTN; PAM sequence: TTC
  source 1..20: mol_type = other DNA
ccttttatctctctactact

SEQ ID NO: 16200 - DNA, 20 bp, synthetic construct
  misc_feature 1..20: note = Description of Artificial Sequence: Synthetic oligonucleotide
  misc_feature 1..20: note = Target: ANGPTL3; (+) strand; PAM type: YTN; PAM sequence: CTT
  source 1..20: mol_type = other DNA
ttatctctctactacttaat

SEQ ID NO: 16201 - DNA, 20 bp, synthetic construct
  misc_feature 1..20: note = Description of Artificial Sequence: Synthetic oligonucleotide
  misc_feature 1..20: note = Target: ANGPTL3; (+) strand; PAM type: YTN; PAM sequence: TTT
  source 1..20: mol_type = other DNA
tatctctctactacttaata

SEQ ID NO: 16202 - DNA, 20 bp, synthetic construct
  misc_feature 1..20: note = Description of Artificial Sequence: Synthetic oligonucleotide
  misc_feature 1..20: note = Target: ANGPTL3; (+) strand; PAM type: YTN; PAM sequence: TTT
  source 1..20: mol_type = other DNA
atctctctactacttaataa

SEQ ID NO: 16203 - DNA, 20 bp, synthetic construct
  misc_feature 1..20: note = Description of Artificial Sequence: Synthetic oligonucleotide
  misc_feature 1..20: note = Target: ANGPTL3; (+) strand; PAM type: YTN; PAM sequence: TTA
  source 1..20: mol_type = other DNA
tctctctactacttaataat

SEQ ID NO: 16204 - DNA, 20 bp, synthetic construct
  misc_feature 1..20: note = Description of Artificial Sequence: Synthetic oligonucleotide
  misc_feature 1..20: note = Target: ANGPTL3; (+) strand; PAM type: YTN; PAM sequence: CTC
  source 1..20: mol_type = other DNA
tctactacttaataataaga

SEQ ID NO: 16205 - DNA, 20 bp, synthetic construct
  misc_feature 1..20: note = Description of Artificial Sequence: Synthetic oligonucleotide
  misc_feature 1..20: note = Target: ANGPTL3; (+) strand; PAM type: YTN; PAM sequence: CTC
  source 1..20: mol_type = other DNA
tactacttaataataagaat

SEQ ID NO: 16206 - DNA, 20 bp, synthetic construct
  misc_feature 1..20: note = Description of Artificial Sequence: Synthetic oligonucleotide
  misc_feature 1..20: note = Target: ANGPTL3; (+) strand; PAM type: YTN; PAM sequence: CTA
  source 1..20: mol_type = other DNA
ctacttaataataagaatat

SEQ ID NO: 16207 - DNA, 20 bp, synthetic construct
  misc_feature 1..20: note = Description of Artificial Sequence: Synthetic oligonucleotide
  misc_feature 1..20: note = Target: ANGPTL3; (+) strand; PAM type: YTN; PAM sequence: CTA
  source 1..20: mol_type = other DNA
cttaataataagaatatctt

SEQ ID NO: 16208 - DNA, 20 bp, synthetic construct
  misc_feature 1..20: note = Description of Artificial Sequence: Synthetic oligonucleotide
  misc_feature 1..20: note = Target: ANGPTL3; (+) strand; PAM type: YTN; PAM sequence: CTT
  source 1..20: mol_type = other DNA
aataataagaatatcttttt

SEQ ID NO: 16209 - DNA, 20 bp, synthetic construct
  misc_feature 1..20: note = Description of Artificial Sequence: Synthetic oligonucleotide
  misc_feature 1..20: note = Target: ANGPTL3; (+) strand; PAM type: YTN; PAM sequence: TTA
  source 1..20: mol_type = other DNA
ataataagaatatctttttt

SEQ ID NO: 16210 - DNA, 20 bp, synthetic construct
  misc_feature 1..20: note = Description of Artificial Sequence: Synthetic oligonucleotide
  misc_feature 1..20: note = Target: ANGPTL3; (+) strand; PAM type: YTN; PAM sequence: CTT
  source 1..20: mol_type = other DNA
tttttcaaacttgaccttca

SEQ ID NO: 16211 - DNA, 20 bp, synthetic construct
  misc_feature 1..20: note = Description of Artificial Sequence: Synthetic oligonucleotide
  misc_feature 1..20: note = Target: ANGPTL3; (+) strand; PAM type: YTN; PAM sequence: TTT
  source 1..20: mol_type = other DNA
ttttcaaacttgaccttcat

SEQ ID NO: 16212 - DNA, 20 bp, synthetic construct
  misc_feature 1..20: note = Description of Artificial Sequence: Synthetic oligonucleotide
  misc_feature 1..20: note = Target: ANGPTL3; (+) strand; PAM type: YTN; PAM sequence: TTT
  source 1..20: mol_type = other DNA
tttcaaacttgaccttcatt

SEQ ID NO: 16213 - DNA, 20 bp, synthetic construct
  misc_feature 1..20: note = Description of Artificial Sequence: Synthetic oligonucleotide
  misc_feature 1..20: note = Target: ANGPTL3; (+) strand; PAM type: YTN; PAM sequence: TTT
  source 1..20: mol_type = other DNA
ttcaaacttgaccttcattt

SEQ ID NO: 16214 - DNA, 20 bp, synthetic construct
  misc_feature 1..20: note = Description of Artificial Sequence: Synthetic oligonucleotide
  misc_feature 1..20: note = Target: ANGPTL3; (+) strand; PAM type: YTN; PAM sequence: TTT
  source 1..20: mol_type = other DNA
tcaaacttgaccttcatttt

SEQ ID NO: 16215 - DNA, 20 bp, synthetic construct
  misc_feature 1..20: note = Description of Artificial Sequence: Synthetic oligonucleotide
  misc_feature 1..20: note = Target: ANGPTL3; (+) strand; PAM type: YTN; PAM sequence: TTT
  source 1..20: mol_type = other DNA
caaacttgaccttcattttg

SEQ ID NO: 16216 - DNA, 20 bp, synthetic construct
  misc_feature 1..20: note = Description of Artificial Sequence: Synthetic oligonucleotide
  misc_feature 1..20: note = Target: ANGPTL3; (+) strand; PAM type: YTN; PAM sequence: TTC
  source 1..20: mol_type = other DNA
aaacttgaccttcattttgc

SEQ ID NO: 16217 - DNA, 20 bp, synthetic construct
  misc_feature 1..20: note = Description of Artificial Sequence: Synthetic oligonucleotide
  misc_feature 1..20: note = Target: ANGPTL3; (+) strand; PAM type: YTN; PAM sequence: CTT
  source 1..20: mol_type = other DNA
gaccttcattttgctttcac

SEQ ID NO: 16218 - DNA, 20 bp, synthetic construct
  misc_feature 1..20: note = Description of Artificial Sequence: Synthetic oligonucleotide
  misc_feature 1..20: note = Target: ANGPTL3; (+) strand; PAM type: YTN; PAM sequence: TTG
  source 1..20: mol_type = other DNA
accttcattttgctttcaca

SEQ ID NO: 16219 - DNA, 20 bp, synthetic construct
  misc_feature 1..20: note = Description of Artificial Sequence: Synthetic oligonucleotide
  misc_feature 1..20: note = Target: ANGPTL3; (+) strand; PAM type: YTN; PAM sequence: CTT
  source 1..20: mol_type = other DNA
cattttgctttcacaatact

SEQ ID NO: 16220 - DNA, 20 bp, synthetic construct
  misc_feature 1..20: note = Description of Artificial Sequence: Synthetic oligonucleotide
  misc_feature 1..20: note = Target: ANGPTL3; (+) strand; PAM type: YTN; PAM sequence: TTC
  source 1..20: mol_type = other DNA
attttgctttcacaatacta

SEQ ID NO: 16221 - DNA, 20 bp, synthetic construct
  misc_feature 1..20: note = Description of Artificial Sequence: Synthetic oligonucleotide
  misc_feature 1..20: note = Target: ANGPTL3; (+) strand; PAM type: YTN; PAM sequence: TTT
  source 1..20: mol_type = other DNA
tgctttcacaatactatact

SEQ ID NO: 16222 - DNA, 20 bp, synthetic construct
  misc_feature 1..20: note = Description of Artificial Sequence: Synthetic oligonucleotide
  misc_feature 1..20: note = Target: ANGPTL3; (+) strand; PAM type: YTN; PAM sequence: TTT
  source 1..20: mol_type = other DNA
gctttcacaatactatactc

SEQ ID NO: 16223 - DNA, 20 bp, synthetic construct
  misc_feature 1..20: note = Description of Artificial Sequence: Synthetic oligonucleotide
  misc_feature 1..20: note = Target: ANGPTL3; (+) strand; PAM type: YTN; PAM sequence: TTG
  source 1..20: mol_type = other DNA
ctttcacaatactatactct

SEQ ID NO: 16224 - DNA, 20 bp, synthetic construct
  misc_feature 1..20: note = Description of Artificial Sequence: Synthetic oligonucleotide
  misc_feature 1..20: note = Target: ANGPTL3; (+) strand; PAM type: YTN; PAM sequence: CTT
  source 1..20: mol_type = other DNA
tcacaatactatactctcca

SEQ ID NO: 16225 - DNA, 20 bp, synthetic construct
  misc_feature 1..20: note = Description of Artificial Sequence: Synthetic oligonucleotide
  misc_feature 1..20: note = Target: ANGPTL3; (+) strand; PAM type: YTN; PAM sequence: TTT
  source 1..20: mol_type = other DNA
cacaatactatactctccat

SEQ ID NO: 16226 - DNA, 20 bp, synthetic construct
  misc_feature 1..20: note = Description of Artificial Sequence: Synthetic oligonucleotide
  misc_feature 1..20: note = Target: ANGPTL3; (+) strand; PAM type: YTN; PAM sequence: TTC
  source 1..20: mol_type = other DNA
acaatactatactctccatg

SEQ ID NO: 16227 - DNA, 20 bp, synthetic construct
  misc_feature 1..20: note = Description of Artificial Sequence: Synthetic oligonucleotide
  misc_feature 1..20: note = Target: ANGPTL3; (+) strand; PAM type: YTN; PAM sequence: CTA
  source 1..20: mol_type = other DNA
tactctccatggattatccc

SEQ ID NO: 16228 - DNA, 20 bp, synthetic construct
  misc_feature 1..20: note = Description of Artificial Sequence: Synthetic oligonucleotide
  misc_feature 1..20: note = Target: ANGPTL3; (+) strand; PAM type: YTN; PAM sequence: CTC
  source 1..20: mol_type = other DNA
tccatggattatcccttatc

SEQ ID NO: 16229 - DNA, 20 bp, synthetic construct
  misc_feature 1..20: note = Description of Artificial Sequence: Synthetic oligonucleotide
  misc_feature 1..20: note = Target: ANGPTL3; (+) strand; PAM type: YTN; PAM sequence: CTC
  source 1..20: mol_type = other DNA
catggattatcccttatctg

SEQ ID NO: 16230 - DNA, 20 bp, synthetic construct
  misc_feature 1..20: note = Description of Artificial Sequence: Synthetic oligonucleotide
  misc_feature 1..20: note = Target: ANGPTL3; (+) strand; PAM type: YTN; PAM sequence: TTA
  source 1..20: mol_type = other DNA
tcccttatctgaatccatct

SEQ ID NO: 16231 - DNA, 20 bp, synthetic construct
  misc_feature 1..20: note = Description of Artificial Sequence: Synthetic oligonucleotide
  misc_feature 1..20: note = Target: ANGPTL3; (+) strand; PAM type: YTN; PAM sequence: CTT
  source 1..20: mol_type = other DNA
atctgaatccatctttataa

SEQ ID NO: 16232 - DNA, 20 bp, synthetic construct
  misc_feature 1..20: note = Description of Artificial Sequence: Synthetic oligonucleotide
  misc_feature 1..20: note = Target: ANGPTL3; (+) strand; PAM type: YTN; PAM sequence: TTA
  source 1..20: mol_type = other DNA
tctgaatccatctttataac

SEQ ID NO: 16233 - DNA, 20 bp, synthetic construct
  misc_feature 1..20: note = Description of Artificial Sequence: Synthetic oligonucleotide
  misc_feature 1..20: note = Target: ANGPTL3; (+) strand; PAM type: YTN; PAM sequence: CTG
  source 1..20: mol_type = other DNA
aatccatctttataacccta

SEQ ID NO: 16234 - DNA, 20 bp, synthetic construct
  misc_feature 1..20: note = Description of Artificial Sequence: Synthetic oligonucleotide
  misc_feature 1..20: note = Target: ANGPTL3; (+) strand; PAM type: YTN; PAM sequence: CTT
  source 1..20: mol_type = other DNA
tataaccctattcctttctc

SEQ ID NO: 16235 - DNA, 20 bp, synthetic construct
  misc_feature 1..20: note = Description of Artificial Sequence: Synthetic oligonucleotide
  misc_feature 1..20: note = Target: ANGPTL3; (+) strand; PAM type: YTN; PAM sequence: TTT
  source 1..20: mol_type = other DNA
ataaccctattcctttctca

SEQ ID NO: 16236 - DNA, 20 bp, synthetic construct
  misc_feature 1..20: note = Description of Artificial Sequence: Synthetic oligonucleotide
  misc_feature 1..20: note = Target: ANGPTL3; (+) strand; PAM type: YTN; PAM sequence: TTA
  source 1..20: mol_type = other DNA
taaccctattcctttctcat

SEQ ID NO: 16237 - DNA, 20 bp, synthetic construct
  misc_feature 1..20: note = Description of Artificial Sequence: Synthetic oligonucleotide
  misc_feature 1..20: note = Target: ANGPTL3; (+) strand; PAM type: YTN; PAM sequence: CTA
  source 1..20: mol_type = other DNA
ttcctttctcatatttagta

SEQ ID NO: 16238 - DNA, 20 bp, synthetic construct
  misc_feature 1..20: note = Description of Artificial Sequence: Synthetic oligonucleotide
  misc_feature 1..20: note = Target: ANGPTL3; (+) strand; PAM type: YTN; PAM sequence: TTC
  source 1..20: mol_type = other DNA
ctttctcatatttagtactg

SEQ ID NO: 16239 - DNA, 20 bp, synthetic construct
  misc_feature 1..20: note = Description of Artificial Sequence: Synthetic oligonucleotide
  misc_feature 1..20: note = Target: ANGPTL3; (+) strand; PAM type: YTN; PAM sequence: CTT
  source 1..20: mol_type = other DNA
tctcatatttagtactgtgg

SEQ ID NO: 16240 - DNA, 20 bp, synthetic construct
  misc_feature 1..20: note = Description of Artificial Sequence: Synthetic oligonucleotide
  misc_feature 1..20: note = Target: ANGPTL3; (+) strand; PAM type: YTN; PAM sequence: TTT
  source 1..20: mol_type = other DNA
ctcatatttagtactgtggg

SEQ ID NO: 16241 - DNA, 20 bp, synthetic construct
  misc_feature 1..20: note = Description of Artificial Sequence: Synthetic oligonucleotide
  misc_feature 1..20: note = Target: ANGPTL3; (+) strand; PAM type: YTN; PAM sequence: TTC
  source 1..20: mol_type = other DNA
tcatatttagtactgtgggc

SEQ ID NO: 16242 - DNA, 20 bp, synthetic construct
  misc_feature 1..20: note = Description of Artificial Sequence: Synthetic oligonucleotide
  misc_feature 1..20: note = Target: ANGPTL3; (+) strand; PAM type: YTN; PAM sequence: CTC
  source 1..20: mol_type = other DNA
atatttagtactgtgggcca

SEQ ID NO: 16243 - DNA, 20 bp, synthetic construct
  misc_feature 1..20: note = Description of Artificial Sequence: Synthetic oligonucleotide
  misc_feature 1..20: note = Target: ANGPTL3; (+) strand; PAM type: YTN; PAM sequence: TTT
  source 1..20: mol_type = other DNA
agtactgtgggccaatggac

SEQ ID NO: 16244 - DNA, 20 bp, synthetic construct
  misc_feature 1..20: note = Description of Artificial Sequence: Synthetic oligonucleotide
  misc_feature 1..20: note = Target: ANGPTL3; (+) strand; PAM type: YTN; PAM sequence: TTA
  source 1..20: mol_type = other DNA
gtactgtgggccaatggaca

SEQ ID NO: 16245 - DNA, 20 bp, synthetic construct
  misc_feature 1..20: note = Description of Artificial Sequence: Synthetic oligonucleotide
  misc_feature 1..20: note = Target: ANGPTL3; (+) strand; PAM type: YTN; PAM sequence: CTG
  source 1..20: mol_type = other DNA
tgggccaatggacaaccttc

SEQ ID NO: 16246 - DNA, 20 bp, synthetic construct
  misc_feature 1..20: note = Description of Artificial Sequence: Synthetic oligonucleotide
  misc_feature 1..20: note = Target: ANGPTL3; (+) strand; PAM type: YTN; PAM sequence: CTT
  source 1..20: mol_type = other DNA
caatcatcttttctacactg

SEQ ID NO: 16247 - DNA, 20 bp, synthetic construct
  misc_feature 1..20: note = Description of Artificial Sequence: Synthetic oligonucleotide
  misc_feature 1..20: note = Target: ANGPTL3; (+) strand; PAM type: YTN; PAM sequence: TTC
  source 1..20: mol_type = other DNA
aatcatcttttctacactga

SEQ ID NO: 16248 - DNA, 20 bp, synthetic construct
  misc_feature 1..20: note = Description of Artificial Sequence: Synthetic oligonucleotide
  misc_feature 1..20: note = Target: ANGPTL3; (+) strand; PAM type: YTN; PAM sequence: CTT
  source 1..20: mol_type = other DNA
ttctacactgaccctcagac

SEQ ID NO: 16249 - DNA, 20 bp, synthetic construct
  misc_feature 1..20: note = Description of Artificial Sequence: Synthetic oligonucleotide
  misc_feature 1..20: note = Target: ANGPTL3; (+) strand; PAM type: YTN; PAM sequence: TTT
  source 1..20: mol_type = other DNA
tctacactgaccctcagaca

SEQ ID NO: 16250 - DNA, 20 bp, synthetic construct
  misc_feature 1..20: note = Description of Artificial Sequence: Synthetic oligonucleotide
  misc_feature 1..20: note = Target: ANGPTL3; (+) strand; PAM type: YTN; PAM sequence: TTT
  source 1..20: mol_type = other DNA
ctacactgaccctcagacat

SEQ ID NO: 16251 - DNA, 20 bp, synthetic construct
  misc_feature 1..20: note = Description of Artificial Sequence: Synthetic oligonucleotide
  misc_feature 1..20: note = Target: ANGPTL3; (+) strand; PAM type: YTN; PAM sequence: TTC
  source 1..20: mol_type = other DNA
tacactgaccctcagacatt

SEQ ID NO: 16252 - DNA, 20 bp, synthetic construct
  misc_feature 1..20: note = Description of Artificial Sequence: Synthetic oligonucleotide
  misc_feature 1..20: note = Target: ANGPTL3; (+) strand; PAM type: YTN; PAM sequence: CTA
  source 1..20: mol_type = other DNA
cactgaccctcagacattct

SEQ ID NO: 16253 - DNA, 20 bp, synthetic construct
  misc_feature 1..20: note = Description of Artificial Sequence: Synthetic oligonucleotide
  misc_feature 1..20: note = Target: ANGPTL3; (+) strand; PAM type: YTN; PAM sequence: CTG
  source 1..20: mol_type = other DNA
accctcagacattctatctg

SEQ ID NO: 16254 - DNA, 20 bp, synthetic construct
  misc_feature 1..20: note = Description of Artificial Sequence: Synthetic oligonucleotide
  misc_feature 1..20: note = Target: ANGPTL3; (+) strand; PAM type: YTN; PAM sequence: CTC
  source 1..20: mol_type = other DNA
agacattctatctgctctca

SEQ ID NO: 16255 - DNA, 20 bp, synthetic construct
  misc_feature 1..20: note = Description of Artificial Sequence: Synthetic oligonucleotide
  misc_feature 1..20: note = Target: ANGPTL3; (+) strand; PAM type: YTN; PAM sequence: TTC
  source 1..20: mol_type = other DNA
tatctgctctcacggactcc

SEQ ID NO: 16256 - DNA, 20 bp, synthetic construct
  misc_feature 1..20: note = Description of Artificial Sequence: Synthetic oligonucleotide
  misc_feature 1..20: note = Target: ANGPTL3; (+) strand; PAM type: YTN; PAM sequence: CTA
  source 1..20: mol_type = other DNA
tctgctctcacggactcctt

SEQ ID NO: 16257 - DNA, 20 bp, synthetic construct
  misc_feature 1..20: note = Description of Artificial Sequence: Synthetic oligonucleotide
  misc_feature 1..20: note = Target: ANGPTL3; (+) strand; PAM type: YTN; PAM sequence: CTG
  source 1..20: mol_type = other DNA
ctctcacggactcctttatt

SEQ ID NO: 16258 - DNA, 20 bp, synthetic construct
  misc_feature 1..20: note = Description of Artificial Sequence: Synthetic oligonucleotide
  misc_feature 1..20: note = Target: ANGPTL3; (+) strand; PAM type: YTN; PAM sequence: CTC
  source 1..20: mol_type = other DNA
tcacggactcctttatttac

SEQ ID NO: 16259 - DNA, 20 bp, synthetic construct
  misc_feature 1..20: note = Description of Artificial Sequence: Synthetic oligonucleotide
  misc_feature 1..20: note = Target: ANGPTL3; (+) strand; PAM type: YTN; PAM sequence: CTC
  source 1..20: mol_type = other DNA
acggactcctttatttacca

SEQ ID NO: 16260 - DNA, 20 bp, synthetic construct
  misc_feature 1..20: note = Description of Artificial Sequence: Synthetic oligonucleotide
  misc_feature 1..20: note = Target: ANGPTL3; (+) strand; PAM type: YTN; PAM sequence: CTC
  source 1..20: mol_type = other DNA
ctttatttaccatgaataaa

SEQ ID NO: 16261 - DNA, 20 bp, synthetic construct
  misc_feature 1..20: note = Description of Artificial Sequence: Synthetic oligonucleotide
  misc_feature 1..20: note = Target: ANGPTL3; (+) strand; PAM type: YTN; PAM sequence: CTT
  source 1..20: mol_type = other DNA
tatttaccatgaataaagtt

SEQ ID NO: 16262 - DNA, 20 bp, synthetic construct
  misc_feature 1..20: note = Description of Artificial Sequence: Synthetic oligonucleotide
  misc_feature 1..20: note = Target: ANGPTL3; (+) strand; PAM type: YTN; PAM sequence: TTT
  source 1..20: mol_type = other DNA
atttaccatgaataaagttc

SEQ ID NO: 16263 - DNA, 20 bp, synthetic construct
  misc_feature 1..20: note = Description of Artificial Sequence: Synthetic oligonucleotide
  misc_feature 1..20: note = Target: ANGPTL3; (+) strand; PAM type: YTN; PAM sequence: TTA
  source 1..20: mol_type = other DNA
tttaccatgaataaagttcc

SEQ ID NO: 16264 - DNA, 20 bp, synthetic construct
  misc_feature 1..20: note = Description of Artificial Sequence: Synthetic oligonucleotide
  misc_feature 1..20: note = Target: ANGPTL3; (+) strand; PAM type: YTN; PAM sequence: TTT
  source 1..20: mol_type = other DNA
accatgaataaagttccaaa

SEQ ID NO: 16265 - DNA, 20 bp, synthetic construct
  misc_feature 1..20: note = Description of Artificial Sequence: Synthetic oligonucleotide
  misc_feature 1..20: note = Target: ANGPTL3; (+) strand; PAM type: YTN; PAM sequence: TTA
  source 1..20: mol_type = other DNA
ccatgaataaagttccaaaa

SEQ ID NO: 16266 - DNA, 20 bp, synthetic construct
  misc_feature 1..20: note = Description of Artificial Sequence: Synthetic oligonucleotide
  misc_feature 1..20: note = Target: ANGPTL3; (+) strand; PAM type: YTN; PAM sequence: TTC
  source 1..20: mol_type = other DNA
caaaatctacatattcatcc

SEQ ID NO: 16267 - DNA, 20 bp, synthetic construct
  misc_feature 1..20: note = Description of Artificial Sequence: Synthetic oligonucleotide
  misc_feature 1..20: note = Target: ANGPTL3; (+) strand; PAM type: YTN; PAM sequence: CTA
  source 1..20: mol_type = other DNA
catattcatcccaagtctct

SEQ ID NO: 16268 - DNA, 20 bp, synthetic construct
  misc_feature 1..20: note = Description of Artificial Sequence: Synthetic oligonucleotide
  misc_feature 1..20: note = Target: ANGPTL3; (+) strand; PAM type: YTN; PAM sequence: TTC
  source 1..20: mol_type = other DNA
atcccaagtctctttccagt

SEQ ID NO: 16269 - DNA, 20 bp, synthetic construct
  misc_feature 1..20: note = Description of Artificial Sequence: Synthetic oligonucleotide
  misc_feature 1..20: note = Target: ANGPTL3; (+) strand; PAM type: YTN; PAM sequence: CTC
  source 1..20: mol_type = other DNA
tttccagttccccttcttac

SEQ ID NO: 16270 - DNA, 20 bp, synthetic construct
  misc_feature 1..20: note = Description of Artificial Sequence: Synthetic oligonucleotide
  misc_feature 1..20: note = Target: ANGPTL3; (+) strand; PAM type: YTN; PAM sequence: CTT
  source 1..20: mol_type = other DNA
tccagttccccttcttacat

SEQ ID NO: 16271 - DNA, 20 bp, synthetic construct
  misc_feature 1..20: note = Description of Artificial Sequence: Synthetic oligonucleotide
  misc_feature 1..20: note = Target: ANGPTL3; (+) strand; PAM type: YTN; PAM sequence: TTT
  source 1..20: mol_type = other DNA
ccagttccccttcttacatt

SEQ ID NO: 16272 - DNA, 20 bp, synthetic construct
  misc_feature 1..20: note = Description of Artificial Sequence: Synthetic oligonucleotide
  misc_feature 1..20: note = Target: ANGPTL3; (+) strand; PAM type: YTN; PAM sequence: TTC
  source 1..20: mol_type = other DNA
cagttccccttcttacattg

SEQ ID NO: 16273 - DNA, 20 bp, synthetic construct
  misc_feature 1..20: note = Description of Artificial Sequence: Synthetic oligonucleotide
  misc_feature 1..20: note = Target: ANGPTL3; (+) strand; PAM type: YTN; PAM sequence: TTC
  source 1..20: mol_type = other DNA
cccttcttacattgcctatt

SEQ ID NO: 16274 - DNA, 20 bp, synthetic construct
  misc_feature 1..20: note = Description of Artificial Sequence: Synthetic oligonucleotide
  misc_feature 1..20: note = Target: ANGPTL3; (+) strand; PAM type: YTN; PAM sequence: CTT
  source 1..20: mol_type = other DNA
cttacattgcctatttgcca

SEQ ID NO: 16275 - DNA, 20 bp, synthetic construct
  misc_feature 1..20: note = Description of Artificial Sequence: Synthetic oligonucleotide
  misc_feature 1..20: note = Target: ANGPTL3; (+) strand; PAM type: YTN; PAM sequence: TTC
  source 1..20: mol_type = other DNA
ttacattgcctatttgccat

SEQ ID NO: 16276 - DNA, 20 bp, synthetic construct
  misc_feature 1..20: note = Description of Artificial Sequence: Synthetic oligonucleotide
  misc_feature 1..20: note = Target: ANGPTL3; (+) strand; PAM type: YTN; PAM sequence: CTT
  source 1..20: mol_type = other DNA
acattgcctatttgccattt

SEQ ID NO: 16277 - DNA, 20 bp, synthetic construct
  misc_feature 1..20: note = Description of Artificial Sequence: Synthetic oligonucleotide
  misc_feature 1..20: note = Target: ANGPTL3; (+) strand; PAM type: YTN; PAM sequence: TTA
  source 1..20: mol_type = other DNA
cattgcctatttgccatttc

SEQ ID NO: 16278 - DNA, 20 bp, synthetic construct
  misc_feature 1..20: note = Description of Artificial Sequence: Synthetic oligonucleotide
  misc_feature 1..20: note = Target: ANGPTL3; (+) strand; PAM type: YTN; PAM sequence: TTG
  source 1..20: mol_type = other DNA
cctatttgccatttctccct

SEQ ID NO: 16279 - DNA, 20 bp, synthetic construct
  misc_feature 1..20: note = Description of Artificial Sequence: Synthetic oligonucleotide
  misc_feature 1..20: note = Target: ANGPTL3; (+) strand; PAM type: YTN; PAM sequence: CTA
  source 1..20: mol_type = other DNA
tttgccatttctcccttcaa

SEQ ID NO: 16280 - DNA, 20 bp, synthetic construct
  misc_feature 1..20: note = Description of Artificial Sequence: Synthetic oligonucleotide
  misc_feature 1..20: note = Target: ANGPTL3; (+) strand; PAM type: YTN; PAM sequence: TTT
  source 1..20: mol_type = other DNA
gccatttctcccttcaatac

SEQ ID NO: 16281 - DNA, 20 bp, synthetic construct
  misc_feature 1..20: note = Description of Artificial Sequence: Synthetic oligonucleotide
  misc_feature 1..20: note = Target: ANGPTL3; (+) strand; PAM type: YTN; PAM sequence: TTG
  source 1..20: mol_type = other DNA
ccatttctcccttcaatacc

SEQ ID NO: 16282 - DNA, 20 bp, synthetic construct
  misc_feature 1..20: note = Description of Artificial Sequence: Synthetic oligonucleotide
  misc_feature 1..20: note = Target: ANGPTL3; (+) strand; PAM type: YTN; PAM sequence: TTT
  source 1..20: mol_type = other DNA
ctcccttcaataccctatac

SEQ ID NO: 16283 - DNA, 20 bp, synthetic construct
  misc_feature 1..20: note = Description of Artificial Sequence: Synthetic oligonucleotide
  misc_feature 1..20: note = Target: ANGPTL3; (+) strand; PAM type: YTN; PAM sequence: TTC
  source 1..20: mol_type = other DNA
tcccttcaataccctatact

SEQ ID NO: 16284 - DNA, 20 bp, synthetic construct
  misc_feature 1..20: note = Description of Artificial Sequence: Synthetic oligonucleotide
  misc_feature 1..20: note = Target: ANGPTL3; (+) strand; PAM type: YTN; PAM sequence: CTC
  source 1..20: mol_type = other DNA
ccttcaataccctatacttc

SEQ ID NO: 16285 - DNA, 20 bp, synthetic construct
  misc_feature 1..20: note = Description of Artificial Sequence: Synthetic oligonucleotide
  misc_feature 1..20: note = Target: ANGPTL3; (+) strand; PAM type: YTN; PAM sequence: CTT
  source 1..20: mol_type = other DNA
caataccctatacttcactc

SEQ ID NO: 16286 - DNA, 20 bp, synthetic construct
  misc_feature 1..20: note = Description of Artificial Sequence: Synthetic oligonucleotide
  misc_feature 1..20: note = Target: ANGPTL3; (+) strand; PAM type: YTN; PAM sequence: TTC
  source 1..20: mol_type = other DNA
aataccctatacttcactca

SEQ ID NO: 16287 - DNA, 20 bp, synthetic construct
  misc_feature 1..20: note = Description of Artificial Sequence: Synthetic oligonucleotide
  misc_feature 1..20: note = Target: ANGPTL3; (+) strand; PAM type: YTN; PAM sequence: CTA
  source 1..20: mol_type = other DNA
tacttcactcaaattcaaca

SEQ ID NO: 16288 - DNA, 20 bp, synthetic construct
  misc_feature 1..20: note = Description of Artificial Sequence: Synthetic oligonucleotide
  misc_feature 1..20: note = Target: ANGPTL3; (+) strand; PAM type: YTN; PAM sequence: CTT
  source 1..20: mol_type = other DNA
cactcaaattcaacatacca

SEQ ID NO: 16289 - DNA, 20 bp, synthetic construct
  misc_feature 1..20: note = Description of Artificial Sequence: Synthetic oligonucleotide
  misc_feature 1..20: note = Target: ANGPTL3; (+) strand; PAM type: YTN; PAM sequence: TTC
  source 1..20: mol_type = other DNA
actcaaattcaacataccaa

SEQ ID NO: 16290 - DNA, 20 bp, synthetic construct
  misc_feature 1..20: note = Description of Artificial Sequence: Synthetic oligonucleotide
  misc_feature 1..20: note = Target: ANGPTL3; (+) strand; PAM type: YTN; PAM sequence: CTC
  source 1..20: mol_type = other DNA
aaattcaacataccaaaaat

SEQ ID NO: 16291 - DNA, 20 bp, synthetic construct
  misc_feature 1..20: note = Description of Artificial Sequence: Synthetic oligonucleotide
  misc_feature 1..20: note = Target: ANGPTL3; (+) strand; PAM type: YTN; PAM sequence: TTC
  source 1..20: mol_type = other DNA
aacataccaaaaataaaagg

SEQ ID NO: 16292 - DNA, 20 bp, synthetic construct
  misc_feature 1..20: note = Description of Artificial Sequence: Synthetic oligonucleotide
  misc_feature 1..20: note = Target: ANGPTL3; (+) strand; PAM type: YTN; PAM sequence: CTC
  source 1..20: mol_type = other DNA
acacctgtaatcccaggact

SEQ ID NO: 16293 - DNA, 20 bp, synthetic construct
  misc_feature 1..20: note = Description of Artificial Sequence: Synthetic oligonucleotide
  misc_feature 1..20: note = Target: ANGPTL3; (+) strand; PAM type: YTN; PAM sequence: CTG
  source 1..20: mol_type = other DNA
taatcccaggactttgggag

SEQ ID NO: 16294 - DNA, 20 bp, synthetic construct
  misc_feature 1..20: note = Description of Artificial Sequence: Synthetic oligonucleotide
  misc_feature 1..20: note = Target: ANGPTL3; (+) strand; PAM type: YTN; PAM sequence: CTT
  source 1..20: mol_type = other DNA
tgggaggctgaggcaggtgg

SEQ ID NO: 16295 - DNA, 20 bp, synthetic construct
  misc_feature 1..20: note = Description of Artificial Sequence: Synthetic oligonucleotide
  misc_feature 1..20: note = Target: ANGPTL3; (+) strand; PAM type: YTN; PAM sequence: TTT
  source 1..20: mol_type = other DNA
gggaggctgaggcaggtgga

SEQ ID NO: 16296 - DNA, 20 bp, synthetic construct
  misc_feature 1..20: note = Description of Artificial Sequence: Synthetic oligonucleotide
  misc_feature 1..20: note = Target: ANGPTL3; (+) strand; PAM type: YTN; PAM sequence: TTG
  source 1..20: mol_type = other DNA
ggaggctgaggcaggtggat

SEQ ID NO: 16297 - DNA, 20 bp, synthetic construct
  misc_feature 1..20: note = Description of Artificial Sequence: Synthetic oligonucleotide
  misc_feature 1..20: note = Target: ANGPTL3; (+) strand; PAM type: YTN; PAM sequence: CTG
  source 1..20: mol_type = other DNA
aggcaggtggatcacctgag

SEQ ID NO: 16298 - DNA, 20 bp, synthetic construct
  misc_feature 1..20: note = Description of Artificial Sequence: Synthetic oligonucleotide
  misc_feature 1..20: note = Target: ANGPTL3; (+) strand; PAM type: YTN; PAM sequence: CTG
  source 1..20: mol_type = other DNA
aggtcaggagtctgaccagc

SEQ ID NO: 16299 - DNA, 20 bp, synthetic construct
  misc_feature 1..20: note = Description of Artificial Sequence: Synthetic oligonucleotide
  misc_feature 1..20: note = Target: ANGPTL3; (+) strand; PAM type: YTN; PAM sequence: CTG
  source 1..20: mol_type = other DNA
accagcctgaccaatatggt

SEQ ID NO: 16300 - DNA, 20 bp, synthetic construct
  misc_feature 1..20: note = Description of Artificial Sequence: Synthetic oligonucleotide
  misc_feature 1..20: note = Target: ANGPTL3; (+) strand; PAM type: YTN; PAM sequence: CTG
  source 1..20: mol_type = other DNA
accaatatggtgaaaccccg

SEQ ID NO: 16301 - DNA, 20 bp, synthetic construct
  misc_feature 1..20: note = Description of Artificial Sequence: Synthetic oligonucleotide
  misc_feature 1..20: note = Target: ANGPTL3; (+) strand; PAM type: YTN; PAM sequence: CTC
  source 1..20: mol_type = other DNA
tacctaaaatacaaaaatta

SEQ ID NO: 16302 - DNA, 20 bp, synthetic construct
  misc_feature 1..20: note = Description of Artificial Sequence: Synthetic oligonucleotide
  misc_feature 1..20: note = Target: ANGPTL3; (+) strand; PAM type: YTN; PAM sequence: CTA
  source 1..20: mol_type = other DNA
cctaaaatacaaaaattagc

SEQ ID NO: 16303 - DNA, 20 bp, synthetic construct
  misc_feature 1..20: note = Description of Artificial Sequence: Synthetic oligonucleotide
  misc_feature 1..20: note = Target: ANGPTL3; (+) strand; PAM type: YTN; PAM sequence: CTA
  source 1..20: mol_type = other DNA
aaatacaaaaattagccagg

SEQ ID NO: 16304 - DNA, 20 bp, synthetic construct
  misc_feature 1..20: note = Description of Artificial Sequence: Synthetic oligonucleotide
  misc_feature 1..20: note = Target: ANGPTL3; (+) strand; PAM type: YTN; PAM sequence: TTA
  source 1..20: mol_type = other DNA
gccaggcgtggtggcatgtg

SEQ ID NO: 16305 - DNA, 20 bp, synthetic construct
  misc_feature 1..20: note = Description of Artificial Sequence: Synthetic oligonucleotide
  misc_feature 1..20: note = Target: ANGPTL3; (+) strand; PAM type: YTN; PAM sequence: CTA
  source 1..20: mol_type = other DNA
cagtcccagctactcaagag

SEQ ID NO: 16306 - DNA, 20 bp, synthetic construct
  misc_feature 1..20: note = Description of Artificial Sequence: Synthetic oligonucleotide
  misc_feature 1..20: note = Target: ANGPTL3; (+) strand; PAM type: YTN; PAM sequence: CTA
  source 1..20: mol_type = other DNA
ctcaagaggctgagacagga

SEQ ID NO: 16307 - DNA, 20 bp, synthetic construct
  misc_feature 1..20: note = Description of Artificial Sequence: Synthetic oligonucleotide
  misc_feature 1..20: note = Target: ANGPTL3; (+) strand; PAM type: YTN; PAM sequence: CTC
  source 1..20: mol_type = other DNA
aagaggctgagacaggagaa

SEQ ID NO: 16308 - DNA, 20 bp, synthetic construct
  misc_feature 1..20: note = Description of Artificial Sequence: Synthetic oligonucleotide
  misc_feature 1..20: note = Target: ANGPTL3; (+) strand; PAM type: YTN; PAM sequence: CTG
  source 1..20: mol_type = other DNA
agacaggagaatcgcttgaa

SEQ ID NO: 16309 - DNA, 20 bp, synthetic construct
  misc_feature 1..20: note = Description of Artificial Sequence: Synthetic oligonucleotide
  misc_feature 1..20: note = Target: ANGPTL3; (+) strand; PAM type: YTN; PAM sequence: CTT
  source 1..20: mol_type = other DNA
gaacccaggaggcggaggtt

SEQ ID NO: 16310 - DNA, 20 bp, synthetic construct
  misc_feature 1..20: note = Description of Artificial Sequence: Synthetic oligonucleotide
  misc_feature 1..20: note = Target: ANGPTL3; (+) strand; PAM type: YTN; PAM sequence: TTG
  source 1..20: mol_type = other DNA
aacccaggaggcggaggttg

SEQ ID NO: 16311 - DNA, 20 bp, synthetic construct
  misc_feature 1..20: note = Description of Artificial Sequence: Synthetic oligonucleotide
  misc_feature 1..20: note = Target: ANGPTL3; (+) strand; PAM type: YTN; PAM sequence: TTG
  source 1..20: mol_type = other DNA
cagtgagctgagatcacacc

SEQ ID NO: 16312 - DNA, 20 bp, synthetic construct
  misc_feature 1..20: note = Description of Artificial Sequence: Synthetic oligonucleotide
  misc_feature 1..20: note = Target: ANGPTL3; (+) strand; PAM type: YTN; PAM sequence: CTG
  source 1..20: mol_type = other DNA
agatcacaccaatgcactgg

SEQ ID NO: 16313 - DNA, 20 bp, synthetic construct
  misc_feature 1..20: note = Description of Artificial Sequence: Synthetic oligonucleotide
  misc_feature 1..20: note = Target: ANGPTL3; (+) strand; PAM type: YTN; PAM sequence: CTG
  source 1..20: mol_type = other DNA
ggtgacagaacaagactgac

SEQ ID NO: 16314 - DNA, 20 bp, synthetic construct
  misc_feature 1..20: note = Description of Artificial Sequence: Synthetic oligonucleotide
  misc_feature 1..20: note = Target: ANGPTL3; (+) strand; PAM type: YTN; PAM sequence: CTG
  source 1..20: mol_type = other DNA
actcaaaaaaaaataaataa

SEQ ID NO: 16315 - DNA, 20 bp, synthetic construct
  misc_feature 1..20: note = Description of Artificial Sequence: Synthetic oligonucleotide
  misc_feature 1..20: note = Target: ANGPTL3; (+) strand; PAM type: YTN; PAM sequence: CTC
  source 1..20: mol_type = other DNA
aaaaaaaaataaataacaaa

SEQ ID NO: 16316 - DNA, 20 bp, synthetic construct
  misc_feature 1..20: note = Description of Artificial Sequence: Synthetic oligonucleotide
  misc_feature 1..20: note = Target: ANGPTL3; (+) strand; PAM type: YTN; PAM sequence: TTC
  source 1..20: mol_type = other DNA
cccagccccttactgctact

SEQ ID NO: 16317 - DNA, 20 bp, synthetic construct
  misc_feature 1..20: note = Description of Artificial Sequence: Synthetic oligonucleotide
  misc_feature 1..20: note = Target: ANGPTL3; (+) strand; PAM type: YTN; PAM sequence: CTT
  source 1..20: mol_type = other DNA
actgctactgctatcccttt

SEQ ID NO: 16318 - DNA, 20 bp, synthetic construct
  misc_feature 1..20: note = Description of Artificial Sequence: Synthetic oligonucleotide
  misc_feature 1..20: note = Target: ANGPTL3; (+) strand; PAM type: YTN; PAM sequence: TTA
  source 1..20: mol_type = other DNA
ctgctactgctatccctttc

SEQ ID NO: 16319 - DNA, 20 bp, synthetic construct
  misc_feature 1..20: note = Description of Artificial Sequence: Synthetic oligonucleotide
  misc_feature 1..20: note = Target: ANGPTL3; (+) strand; PAM type: YTN; PAM sequence: CTG
  source 1..20: mol_type = other DNA
ctactgctatccctttctac

SEQ ID NO: 16320 - DNA, 20 bp, synthetic construct
  misc_feature 1..20: note = Description of Artificial Sequence: Synthetic oligonucleotide
  misc_feature 1..20: note = Target: ANGPTL3; (+) strand; PAM type: YTN; PAM sequence: CTA
  source 1..20: mol_type = other DNA
ctgctatccctttctaccca

SEQ ID NO: 16321 - DNA, 20 bp, synthetic construct
  misc_feature 1..20: note = Description of Artificial Sequence: Synthetic oligonucleotide
  misc_feature 1..20: note = Target: ANGPTL3; (+) strand; PAM type: YTN; PAM sequence: CTG
  source 1..20: mol_type = other DNA
ctatccctttctacccacct

SEQ ID NO: 16322 - DNA, 20 bp, synthetic construct
  misc_feature 1..20: note = Description of Artificial Sequence: Synthetic oligonucleotide
  misc_feature 1..20: note = Target: ANGPTL3; (+) strand; PAM type: YTN; PAM sequence: CTA
  source 1..20: mol_type = other DNA
tccctttctacccacctttc

SEQ ID NO: 16323 - DNA, 20 bp, synthetic construct
  misc_feature 1..20: note = Description of Artificial Sequence: Synthetic oligonucleotide
  misc_feature 1..20: note = Target: ANGPTL3; (+) strand; PAM type: YTN; PAM sequence: CTT
  source 1..20: mol_type = other DNA
tctacccacctttccctcct

SEQ ID NO: 16324 - DNA, 20 bp, synthetic construct
  misc_feature 1..20: note = Description of Artificial Sequence: Synthetic oligonucleotide
  misc_feature 1..20: note = Target: ANGPTL3; (+) strand; PAM type: YTN; PAM sequence: TTT
  source 1..20: mol_type = other DNA
ctacccacctttccctcctt

SEQ ID NO: 16325 - DNA, 20 bp, synthetic construct
  misc_feature 1..20: note = Description of Artificial Sequence: Synthetic oligonucleotide
  misc_feature 1..20: note = Target: ANGPTL3; (+) strand; PAM type: YTN; PAM sequence: TTC
  source 1..20: mol_type = other DNA
tacccacctttccctccttt

SEQ ID NO: 16326 - DNA, 20 bp, synthetic construct
  misc_feature 1..20: note = Description of Artificial Sequence: Synthetic oligonucleotide
  misc_feature 1..20: note = Target: ANGPTL3; (+) strand; PAM type: YTN; PAM sequence: CTA
  source 1..20: mol_type = other DNA
cccacctttccctcctttat

SEQ ID NO: 16327 - DNA, 20 bp, synthetic construct
  misc_feature 1..20: note = Description of Artificial Sequence: Synthetic oligonucleotide
  misc_feature 1..20: note = Target: ANGPTL3; (+) strand; PAM type: YTN; PAM sequence: CTT
  source 1..20: mol_type = other DNA
tccctcctttatactctttc

SEQ ID NO: 16328 - DNA, 20 bp, synthetic construct
  misc_feature 1..20: note = Description of Artificial Sequence: Synthetic oligonucleotide
  misc_feature 1..20: note = Target: ANGPTL3; (+) strand; PAM type: YTN; PAM sequence: TTT
  source 1..20: mol_type = other DNA
ccctcctttatactctttca

SEQ ID NO: 16329 - DNA, 20 bp, synthetic construct
  misc_feature 1..20: note = Description of Artificial Sequence: Synthetic oligonucleotide
  misc_feature 1..20: note = Target: ANGPTL3; (+) strand; PAM type: YTN; PAM sequence: TTC
  source 1..20: mol_type = other DNA
cctcctttatactctttcac

SEQ ID NO: 16330 - DNA, 20 bp, synthetic construct
  misc_feature 1..20: note = Description of Artificial Sequence: Synthetic oligonucleotide
  misc_feature 1..20: note = Target: ANGPTL3; (+) strand; PAM type: YTN; PAM sequence: CTC
  source 1..20: mol_type = other DNA
ctttatactctttcacacca

SEQ ID NO: 16331 - DNA, 20 bp, synthetic construct
  misc_feature 1..20: note = Description of Artificial Sequence: Synthetic oligonucleotide
  misc_feature 1..20: note = Target: ANGPTL3; (+) strand; PAM type: YTN; PAM sequence: CTT
  source 1..20: mol_type = other DNA
tatactctttcacaccatct

SEQ ID NO: 16332 - DNA, 20 bp, synthetic construct
  misc_feature 1..20: note = Description of Artificial Sequence: Synthetic oligonucleotide
  misc_feature 1..20: note = Target: ANGPTL3; (+) strand; PAM type: YTN; PAM sequence: TTT
  source 1..20: mol_type = other DNA
atactctttcacaccatctt

SEQ ID NO: 16333 - DNA, 20 bp, synthetic construct
  misc_feature 1..20: note = Description of Artificial Sequence: Synthetic oligonucleotide
  misc_feature 1..20: note = Target: ANGPTL3; (+) strand; PAM type: YTN; PAM sequence: TTA
  source 1..20: mol_type = other DNA
tactctttcacaccatcttc

SEQ ID NO: 16334 - DNA, 20 bp, synthetic construct
  misc_feature 1..20: note = Description of Artificial Sequence: Synthetic oligonucleotide
  misc_feature 1..20: note = Target: ANGPTL3; (+) strand; PAM type: YTN; PAM sequence: CTC
  source 1..20: mol_type = other DNA
tttcacaccatcttcctcac

SEQ ID NO: 16335 - DNA, 20 bp, synthetic construct
  misc_feature 1..20: note = Description of Artificial Sequence: Synthetic oligonucleotide
  misc_feature 1..20: note = Target: ANGPTL3; (+) strand; PAM type: YTN; PAM sequence: CTT
  source 1..20: mol_type = other DNA
tcacaccatcttcctcactt

SEQ ID NO: 16336 - DNA, 20 bp, synthetic construct
  misc_feature 1..20: note = Description of Artificial Sequence: Synthetic oligonucleotide
  misc_feature 1..20: note = Target: ANGPTL3; (+) strand; PAM type: YTN; PAM sequence: TTT
  source 1..20: mol_type = other DNA
cacaccatcttcctcacttc

SEQ ID NO: 16337 - DNA, 20 bp, synthetic construct
  misc_feature 1..20: note = Description of Artificial Sequence: Synthetic oligonucleotide
  misc_feature 1..20: note = Target: ANGPTL3; (+) strand; PAM type: YTN; PAM sequence: TTC
  source 1..20: mol_type = other DNA
acaccatcttcctcacttct

SEQ ID NO: 16338 - DNA, 20 bp, synthetic construct
  misc_feature 1..20: note = Description of Artificial Sequence: Synthetic oligonucleotide
  misc_feature 1..20: note = Target: ANGPTL3; (+) strand; PAM type: YTN; PAM sequence: CTT
  source 1..20: mol_type = other DNA
cctcacttctttatatccat

SEQ ID NO: 16339 - DNA, 20 bp, synthetic construct
  misc_feature 1..20: note = Description of Artificial Sequence: Synthetic oligonucleotide
  misc_feature 1..20: note = Target: ANGPTL3; (+) strand; PAM type: YTN; PAM sequence: TTC
  source 1..20: mol_type = other DNA
ctcacttctttatatccatt

SEQ ID NO: 16340 - DNA, 20 bp, synthetic construct
  misc_feature 1..20: note = Description of Artificial Sequence: Synthetic oligonucleotide
  misc_feature 1..20: note = Target: ANGPTL3; (+) strand; PAM type: YTN; PAM sequence: CTC
  source 1..20: mol_type = other DNA
acttctttatatccattaat

SEQ ID NO: 16341 - DNA, 20 bp, synthetic construct
  misc_feature 1..20: note = Description of Artificial Sequence: Synthetic oligonucleotide
  misc_feature 1..20: note = Target: ANGPTL3; (+) strand; PAM type: YTN; PAM sequence: CTT
  source 1..20: mol_type = other DNA
ctttatatccattaatatga

SEQ ID NO: 16342 - DNA, 20 bp, synthetic construct
  misc_feature 1..20: note = Description of Artificial Sequence: Synthetic oligonucleotide
  misc_feature 1..20: note = Target: ANGPTL3; (+) strand; PAM type: YTN; PAM sequence: TTC
  source 1..20: mol_type = other DNA
tttatatccattaatatgac

SEQ ID NO: 16343 - DNA, 20 bp, synthetic construct
  misc_feature 1..20: note = Description of Artificial Sequence: Synthetic oligonucleotide
  misc_feature 1..20: note = Target: ANGPTL3; (+) strand; PAM type: YTN; PAM sequence: CTT
  source 1..20: mol_type = other DNA
tatatccattaatatgacca

SEQ ID NO: 16344 - DNA, 20 bp, synthetic construct
  misc_feature 1..20: note = Description of Artificial Sequence: Synthetic oligonucleotide
  misc_feature 1..20: note = Target: ANGPTL3; (+) strand; PAM type: YTN; PAM sequence: TTT
  source 1..20: mol_type = other DNA
atatccattaatatgaccag

SEQ ID NO: 16345 - DNA, 20 bp, synthetic construct
  misc_feature 1..20: note = Description of Artificial Sequence: Synthetic oligonucleotide
  misc_feature 1..20: note = Target: ANGPTL3; (+) strand; PAM type: YTN; PAM sequence: TTA
  source 1..20: mol_type = other DNA
tatccattaatatgaccagc

SEQ ID NO: 16346 - DNA, 20 bp, synthetic construct
  misc_feature 1..20: note = Description of Artificial Sequence: Synthetic oligonucleotide
  misc_feature 1..20: note = Target: ANGPTL3; (+) strand; PAM type: YTN; PAM sequence: TTA
  source 1..20: mol_type = other DNA
atatgaccagcatgttccca

SEQ ID NO: 16347 - DNA, 20 bp, synthetic construct
  misc_feature 1..20: note = Description of Artificial Sequence: Synthetic oligonucleotide
  misc_feature 1..20: note = Target: ANGPTL3; (+) strand; PAM type: YTN; PAM sequence: TTC
  source 1..20: mol_type = other DNA
ccagtcacagaagcctggaa

SEQ ID NO: 16348 - DNA, 20 bp, synthetic construct
  misc_feature 1..20: note = Description of Artificial Sequence: Synthetic oligonucleotide
  misc_feature 1..20: note = Target: ANGPTL3; (+) strand; PAM type: YTN; PAM sequence: CTG
  source 1..20: mol_type = other DNA
gaacccggaagacatctctg

SEQ ID NO: 16349 - DNA, 20 bp, synthetic construct
  misc_feature 1..20: note = Description of Artificial Sequence: Synthetic oligonucleotide
  misc_feature 1..20: note = Target: ANGPTL3; (+) strand; PAM type: YTN; PAM sequence: CTC
  source 1..20: mol_type = other DNA
tggcttttcactcaactttg

SEQ ID NO: 16350 - DNA, 20 bp, synthetic construct
  misc_feature 1..20: note = Description of Artificial Sequence: Synthetic oligonucleotide
  misc_feature 1..20: note = Target: ANGPTL3; (+) strand; PAM type: YTN; PAM sequence: CTG
  source 1..20: mol_type = other DNA
gcttttcactcaactttgta

SEQ ID NO: 16351 - DNA, 20 bp, synthetic construct
  misc_feature 1..20: note = Description of Artificial Sequence: Synthetic oligonucleotide
  misc_feature 1..20: note = Target: ANGPTL3; (+) strand; PAM type: YTN; PAM sequence: CTT
  source 1..20: mol_type = other DNA
ttcactcaactttgtaaact

SEQ ID NO: 16352 - DNA, 20 bp, synthetic construct
  misc_feature 1..20: note = Description of Artificial Sequence: Synthetic oligonucleotide
  misc_feature 1..20: note = Target: ANGPTL3; (+) strand; PAM type: YTN; PAM sequence: TTT
  source 1..20: mol_type = other DNA
tcactcaactttgtaaacta

SEQ ID NO: 16353 - DNA, 20 bp, synthetic construct
  misc_feature 1..20: note = Description of Artificial Sequence: Synthetic oligonucleotide
  misc_feature 1..20: note = Target: ANGPTL3; (+) strand; PAM type: YTN; PAM sequence: TTT
  source 1..20: mol_type = other DNA
cactcaactttgtaaactac

SEQ ID NO: 16354 - DNA, 20 bp, synthetic construct
  misc_feature 1..20: note = Description of Artificial Sequence: Synthetic oligonucleotide
  misc_feature 1..20: note = Target: ANGPTL3; (+) strand; PAM type: YTN; PAM sequence: TTC
  source 1..20: mol_type = other DNA
actcaactttgtaaactacc

SEQ ID NO: 16355 - DNA, 20 bp, synthetic construct
  misc_feature 1..20: note = Description of Artificial Sequence: Synthetic oligonucleotide
  misc_feature 1..20: note = Target: ANGPTL3; (+) strand; PAM type: YTN; PAM sequence: CTC
  source 1..20: mol_type = other DNA
aactttgtaaactacctctt

SEQ ID NO: 16356 - DNA, 20 bp, synthetic construct
  misc_feature 1..20: note = Description of Artificial Sequence: Synthetic oligonucleotide
  misc_feature 1..20: note = Target: ANGPTL3; (+) strand; PAM type: YTN; PAM sequence: CTT
  source 1..20: mol_type = other DNA
tgtaaactacctcttttgta

SEQ ID NO: 16357 - DNA, 20 bp, synthetic construct
  misc_feature 1..20: note = Description of Artificial Sequence: Synthetic oligonucleotide
  misc_feature 1..20: note = Target: ANGPTL3; (+) strand; PAM type: YTN; PAM sequence: TTT
  source 1..20: mol_type = other DNA
gtaaactacctcttttgtat

SEQ ID NO: 16358 - DNA, 20 bp, synthetic construct
  misc_feature 1..20: note = Description of Artificial Sequence: Synthetic oligonucleotide
  misc_feature 1..20: note = Target: ANGPTL3; (+) strand; PAM type: YTN; PAM sequence: TTG
  source 1..20: mol_type = other DNA
taaactacctcttttgtatc

SEQ ID NO: 16359 - DNA, 20 bp, synthetic construct
  misc_feature 1..20: note = Description of Artificial Sequence: Synthetic oligonucleotide
  misc_feature 1..20: note = Target: ANGPTL3; (+) strand; PAM type: YTN; PAM sequence: CTA
  source 1..20: mol_type = other DNA
cctcttttgtatcataagcc

SEQ ID NO: 16360 - DNA, 20 bp, synthetic construct
  misc_feature 1..20: note = Description of Artificial Sequence: Synthetic oligonucleotide
  misc_feature 1..20: note = Target: ANGPTL3; (+) strand; PAM type: YTN; PAM sequence: CTC
  source 1..20: mol_type = other DNA
ttttgtatcataagccacca

SEQ ID NO: 16361 - DNA, 20 bp, synthetic construct
  misc_feature 1..20: note = Description of Artificial Sequence: Synthetic oligonucleotide
  misc_feature 1..20: note = Target: ANGPTL3; (+) strand; PAM type: YTN; PAM sequence: CTT
  source 1..20: mol_type = other DNA
ttgtatcataagccaccaag

SEQ ID NO: 16362 - DNA, 20 bp, synthetic construct
  misc_feature 1..20: note = Description of Artificial Sequence: Synthetic oligonucleotide
  misc_feature 1..20: note = Target: ANGPTL3; (+) strand; PAM type: YTN; PAM sequence: TTT
  source 1..20: mol_type = other DNA
tgtatcataagccaccaagt

SEQ ID NO: 16363 - DNA, 20 bp, synthetic construct
  misc_feature 1..20: note = Description of Artificial Sequence: Synthetic oligonucleotide
  misc_feature 1..20: note = Target: ANGPTL3; (+) strand; PAM type: YTN; PAM sequence: TTT
  source 1..20: mol_type = other DNA
gtatcataagccaccaagtt

SEQ ID NO: 16364 - DNA, 20 bp, synthetic construct
  misc_feature 1..20: note = Description of Artificial Sequence: Synthetic oligonucleotide
  misc_feature 1..20: note = Target: ANGPTL3; (+) strand; PAM type: YTN; PAM sequence: TTG
  source 1..20: mol_type = other DNA
tatcataagccaccaagttc

SEQ ID NO: 16365 - DNA, 20 bp, synthetic construct
  misc_feature 1..20: note = Description of Artificial Sequence: Synthetic oligonucleotide
  misc_feature 1..20: note = Target: ANGPTL3; (+) strand; PAM type: YTN; PAM sequence: TTC
  source 1..20: mol_type = other DNA
aatacaatcttctcttgaaa

SEQ ID NO: 16366 - DNA, 20 bp, synthetic construct
  misc_feature 1..20: note = Description of Artificial Sequence: Synthetic oligonucleotide
  misc_feature 1..20: note = Target: ANGPTL3; (+) strand; PAM type: YTN; PAM sequence: CTT
  source 1..20: mol_type = other DNA
ctcttgaaacgtctcttaat

SEQ ID NO: 16367 - DNA, 20 bp, synthetic construct
  misc_feature 1..20: note = Description of Artificial Sequence: Synthetic oligonucleotide
  misc_feature 1..20: note = Target: ANGPTL3; (+) strand; PAM type: YTN; PAM sequence: TTC
  source 1..20: mol_type = other DNA
tcttgaaacgtctcttaatc

SEQ ID NO: 16368 - DNA, 20 bp, synthetic construct
  misc_feature 1..20: note = Description of Artificial Sequence: Synthetic oligonucleotide
  misc_feature 1..20: note = Target: ANGPTL3; (+) strand; PAM type: YTN; PAM sequence: CTC
  source 1..20: mol_type = other DNA
ttgaaacgtctcttaatctt

SEQ ID NO: 16369 - DNA, 20 bp, synthetic construct
  misc_feature 1..20: note = Description of Artificial Sequence: Synthetic oligonucleotide
  misc_feature 1..20: note = Target: ANGPTL3; (+) strand; PAM type: YTN; PAM sequence: CTT
  source 1..20: mol_type = other DNA
gaaacgtctcttaatcttat

SEQ ID NO: 16370 - DNA, 20 bp, synthetic construct
  misc_feature 1..20: note = Description of Artificial Sequence: Synthetic oligonucleotide
  misc_feature 1..20: note = Target: ANGPTL3; (+) strand; PAM type: YTN; PAM sequence: TTG
  source 1..20: mol_type = other DNA
aaacgtctcttaatcttata

SEQ ID NO: 16371 - DNA, 20 bp, synthetic construct
  misc_feature 1..20: note = Description of Artificial Sequence: Synthetic oligonucleotide
  misc_feature 1..20: note = Target: ANGPTL3; (+) strand; PAM type: YTN; PAM sequence: CTC
  source 1..20: mol_type = other DNA
ttaatcttataagctttctt

SEQ ID NO: 16372 - DNA, 20 bp, synthetic construct
  misc_feature 1..20: note = Description of Artificial Sequence: Synthetic oligonucleotide
  misc_feature 1..20: note = Target: ANGPTL3; (+) strand; PAM type: YTN; PAM sequence: CTT
  source 1..20: mol_type = other DNA
aatcttataagctttcttcc

SEQ ID NO: 16373 - DNA, 20 bp, synthetic construct
  misc_feature 1..20: note = Description of Artificial Sequence: Synthetic oligonucleotide
  misc_feature 1..20: note = Target: ANGPTL3; (+) strand; PAM type: YTN; PAM sequence: TTA
  source 1..20: mol_type = other DNA
atcttataagctttcttccc

SEQ ID NO: 16374 - DNA, 20 bp, synthetic construct
  misc_feature 1..20: note = Description of Artificial Sequence: Synthetic oligonucleotide
  misc_feature 1..20: note = Target: ANGPTL3; (+) strand; PAM type: YTN; PAM sequence: CTT
  source 1..20: mol_type = other DNA
ataagctttcttccccaaag

SEQ ID NO: 16375 - DNA, 20 bp, synthetic construct
  misc_feature 1..20: note = Description of Artificial Sequence: Synthetic oligonucleotide
  misc_feature 1..20: note = Target: ANGPTL3; (+) strand; PAM type: YTN; PAM sequence: TTA
  source 1..20: mol_type = other DNA
taagctttcttccccaaaga

SEQ ID NO: 16376 - DNA, 20 bp, synthetic construct
  misc_feature 1..20: note = Description of Artificial Sequence: Synthetic oligonucleotide
  misc_feature 1..20: note = Target: ANGPTL3; (+) strand; PAM type: YTN; PAM sequence: CTT
  source 1..20: mol_type = other DNA
tcttccccaaagactgtctt

SEQ ID NO: 16377 - DNA, 20 bp, synthetic construct
  misc_feature 1..20: note = Description of Artificial Sequence: Synthetic oligonucleotide
  misc_feature 1..20: note = Target: ANGPTL3; (+) strand; PAM type: YTN; PAM sequence: TTT
  source 1..20: mol_type = other DNA
cttccccaaagactgtcttt

SEQ ID NO: 16378 - DNA, 20 bp, synthetic construct
  misc_feature 1..20: note = Description of Artificial Sequence: Synthetic oligonucleotide
  misc_feature 1..20: note = Target: ANGPTL3; (+) strand; PAM type: YTN; PAM sequence: TTC
  source 1..20: mol_type = other DNA
ttccccaaagactgtcttta

SEQ ID NO: 16379 - DNA, 20 bp, synthetic construct
  misc_feature 1..20: note = Description of Artificial Sequence: Synthetic oligonucleotide
  misc_feature 1..20: note = Target: ANGPTL3; (+) strand; PAM type: YTN; PAM sequence: CTT
  source 1..20: mol_type = other DNA
ccccaaagactgtctttaac

SEQ ID NO: 16380 - DNA, 20 bp, synthetic construct
  misc_feature 1..20: note = Description of Artificial Sequence: Synthetic oligonucleotide
  misc_feature 1..20: note = Target: ANGPTL3; (+) strand; PAM type: YTN; PAM sequence: TTC
  source 1..20: mol_type = other DNA
cccaaagactgtctttaact

SEQ ID NO: 16381 - DNA, 20 bp, synthetic construct
  misc_feature 1..20: note = Description of Artificial Sequence: Synthetic oligonucleotide
  misc_feature 1..20: note = Target: ANGPTL3; (+) strand; PAM type: YTN; PAM sequence: CTG
  source 1..20: mol_type = other DNA
tctttaacttcagtgctaga

SEQ ID NO: 16382 - DNA, 20 bp, synthetic construct
  misc_feature 1..20: note = Description of Artificial Sequence: Synthetic oligonucleotide
  misc_feature 1..20: note = Target: ANGPTL3; (+) strand; PAM type: YTN; PAM sequence: CTT
  source 1..20: mol_type = other DNA
taacttcagtgctagattat

SEQ ID NO: 16383 - DNA, 20 bp, synthetic construct
  misc_feature 1..20: note = Description of Artificial Sequence: Synthetic oligonucleotide
  misc_feature 1..20: note = Target: ANGPTL3; (+) strand; PAM type: YTN; PAM sequence: TTT
  source 1..20: mol_type = other DNA
aacttcagtgctagattata

SEQ ID NO: 16384 - DNA, 20 bp, synthetic construct
  misc_feature 1..20: note = Description of Artificial Sequence: Synthetic oligonucleotide
  misc_feature 1..20: note = Target: ANGPTL3; (+) strand; PAM type: YTN; PAM sequence: TTA
  source 1..20: mol_type = other DNA
acttcagtgctagattatat

SEQ ID NO: 16385 - DNA, 20 bp, synthetic construct
  misc_feature 1..20: note = Description of Artificial Sequence: Synthetic oligonucleotide
  misc_feature 1..20: note = Target: ANGPTL3; (+) strand; PAM type: YTN; PAM sequence: CTT
  source 1..20: mol_type = other DNA
cagtgctagattatataagt

SEQ ID NO: 16386 - DNA, 20 bp, synthetic construct
  misc_feature 1..20: note = Description of Artificial Sequence: Synthetic oligonucleotide
  misc_feature 1..20: note = Target: ANGPTL3; (+) strand; PAM type: YTN; PAM sequence: TTC
  source 1..20: mol_type = other DNA
agtgctagattatataagta

SEQ ID NO: 16387 - DNA, 20 bp, synthetic construct
  misc_feature 1..20: note = Description of Artificial Sequence: Synthetic oligonucleotide
  misc_feature 1..20: note = Target: ANGPTL3; (+) strand; PAM type: YTN; PAM sequence: CTA
  source 1..20: mol_type = other DNA
gattatataagtagtctctt

SEQ ID NO: 16388 - DNA, 20 bp, synthetic construct
  misc_feature 1..20: note = Description of Artificial Sequence: Synthetic oligonucleotide
  misc_feature 1..20: note = Target: ANGPTL3; (+) strand; PAM type: YTN; PAM sequence: TTA
  source 1..20: mol_type = other DNA
tataagtagtctcttctttc

SEQ ID NO: 16389 - DNA, 20 bp, synthetic construct
  misc_feature 1..20: note = Description of Artificial Sequence: Synthetic oligonucleotide
  misc_feature 1..20: note = Target: ANGPTL3; (+) strand; PAM type: YTN; PAM sequence: CTC
  source 1..20: mol_type = other DNA
ttctttcctcctaattttac

SEQ ID NO: 16390 - DNA, 20 bp, synthetic construct
  misc_feature 1..20: note = Description of Artificial Sequence: Synthetic oligonucleotide
  misc_feature 1..20: note = Target: ANGPTL3; (+) strand; PAM type: YTN; PAM sequence: CTT
  source 1..20: mol_type = other DNA
ctttcctcctaattttacgt

SEQ ID NO: 16391 - DNA, 20 bp, synthetic construct
  misc_feature 1..20: note = Description of Artificial Sequence: Synthetic oligonucleotide
  misc_feature 1..20: note = Target: ANGPTL3; (+) strand; PAM type: YTN; PAM sequence: TTC
  source 1..20: mol_type = other DNA
tttcctcctaattttacgtc

SEQ ID NO: 16392 - DNA, 20 bp, synthetic construct
  misc_feature 1..20: note = Description of Artificial Sequence: Synthetic oligonucleotide
  misc_feature 1..20: note = Target: ANGPTL3; (+) strand; PAM type: YTN; PAM sequence: CTT
  source 1..20: mol_type = other DNA
tcctcctaattttacgtccc

SEQ ID NO: 16393 - DNA, 20 bp, synthetic construct
  misc_feature 1..20: note = Description of Artificial Sequence: Synthetic oligonucleotide
  misc_feature 1..20: note = Target: ANGPTL3; (+) strand; PAM type: YTN; PAM sequence: TTT
  source 1..20: mol_type = other DNA
cctcctaattttacgtccct

SEQ ID NO: 16394 - DNA, 20 bp, synthetic construct
  misc_feature 1..20: note = Description of Artificial Sequence: Synthetic oligonucleotide
  misc_feature 1..20: note = Target: ANGPTL3; (+) strand; PAM type: YTN; PAM sequence: TTC
  source 1..20: mol_type = other DNA
ctcctaattttacgtccctc

SEQ ID NO: 16395 - DNA, 20 bp, synthetic construct
  misc_feature 1..20: note = Description of Artificial Sequence: Synthetic oligonucleotide
  misc_feature 1..20: note = Target: ANGPTL3; (+) strand; PAM type: YTN; PAM sequence: CTC
  source 1..20: mol_type = other DNA
ctaattttacgtccctctcc

SEQ ID NO: 16396 - DNA, 20 bp, synthetic construct
  misc_feature 1..20: note = Description of Artificial Sequence: Synthetic oligonucleotide
  misc_feature 1..20: note = Target: ANGPTL3; (+) strand; PAM type: YTN; PAM sequence: CTA
  source 1..20: mol_type = other DNA
attttacgtccctctccctg

SEQ ID NO: 16397 - DNA, 20 bp, synthetic construct
  misc_feature 1..20: note = Description of Artificial Sequence: Synthetic oligonucleotide
  misc_feature 1..20: note = Target: ANGPTL3; (+) strand; PAM type: YTN; PAM sequence: TTT
  source 1..20: mol_type = other DNA
tacgtccctctccctgtcaa

SEQ ID NO: 16398 - DNA, 20 bp, synthetic construct
  misc_feature 1..20: note = Description of Artificial Sequence: Synthetic oligonucleotide
  misc_feature 1..20: note = Target: ANGPTL3; (+) strand; PAM type: YTN; PAM sequence: TTT
  source 1..20: mol_type = other DNA
acgtccctctccctgtcaat

SEQ ID NO: 16399 - DNA, 20 bp, synthetic construct
  misc_feature 1..20: note = Description of Artificial Sequence: Synthetic oligonucleotide
  misc_feature 1..20: note = Target: ANGPTL3; (+) strand; PAM type: YTN; PAM sequence: TTA
  source 1..20: mol_type = other DNA
cgtccctctccctgtcaatc

SEQ ID NO: 16400 - DNA, 20 bp, synthetic construct
  misc_feature 1..20: note = Description of Artificial Sequence: Synthetic oligonucleotide
  misc_feature 1..20: note = Target: ANGPTL3; (+) strand; PAM type: YTN; PAM sequence: CTC
  source 1..20: mol_type = other DNA
tccctgtcaatcttccgaaa

SEQ ID NO: 16401 - DNA, 20 bp, synthetic construct
  misc_feature 1..20: note = Description of Artificial Sequence: Synthetic oligonucleotide
  misc_feature 1..20: note = Target: ANGPTL3; (+) strand; PAM type: YTN; PAM sequence: CTC
  source 1..20: mol_type = other DNA
cctgtcaatcttccgaaaag

SEQ ID NO: 16402 - DNA, 20 bp, synthetic construct
  misc_feature 1..20: note = Description of Artificial Sequence: Synthetic oligonucleotide
  misc_feature 1..20: note = Target: ANGPTL3; (+) strand; PAM type: YTN; PAM sequence: CTG
  source 1..20: mol_type = other DNA
tcaatcttccgaaaaggaat

SEQ ID NO: 16403 - DNA, 20 bp, synthetic construct
  misc_feature 1..20: note = Description of Artificial Sequence: Synthetic oligonucleotide
  misc_feature 1..20: note = Target: ANGPTL3; (+) strand; PAM type: YTN; PAM sequence: CTT
  source 1..20: mol_type = other DNA
ccgaaaaggaatttgtaatg

SEQ ID NO: 16404 - DNA, 20 bp, synthetic construct
  misc_feature 1..20: note = Description of Artificial Sequence: Synthetic oligonucleotide
  misc_feature 1..20: note = Target: ANGPTL3; (+) strand; PAM type: YTN; PAM sequence: TTC
  source 1..20: mol_type = other DNA
cgaaaaggaatttgtaatgg

SEQ ID NO: 16405 - DNA, 20 bp, synthetic construct
  misc_feature 1..20: note = Description of Artificial Sequence: Synthetic oligonucleotide
  misc_feature 1..20: note = Target: ANGPTL3; (+) strand; PAM type: YTN; PAM sequence: TTT
  source 1..20: mol_type = other DNA
gtaatggctgcatactgcct

SEQ ID NO: 16406 - DNA, 20 bp, synthetic construct
  misc_feature 1..20: note = Description of Artificial Sequence: Synthetic oligonucleotide
  misc_feature 1..20: note = Target: ANGPTL3; (+) strand; PAM type: YTN; PAM sequence: TTG
  source 1..20: mol_type = other DNA
taatggctgcatactgcctg

SEQ ID NO: 16407 - DNA, 20 bp, synthetic construct
  misc_feature 1..20: note = Description of Artificial Sequence: Synthetic oligonucleotide
  misc_feature 1..20: note = Target: ANGPTL3; (+) strand; PAM type: YTN; PAM sequence: CTG
  source 1..20: mol_type = other DNA
catactgcctggacctgtgt

SEQ ID NO: 16408 - DNA, 20 bp, synthetic construct
  misc_feature 1..20: note = Description of Artificial Sequence: Synthetic oligonucleotide
  misc_feature 1..20: note = Target: ANGPTL3; (+) strand; PAM type: YTN; PAM sequence: CTG
  source 1..20: mol_type = other DNA
cctggacctgtgtctttcaa

SEQ ID NO: 16409 - DNA, 20 bp, synthetic construct
  misc_feature 1..20: note = Description of Artificial Sequence: Synthetic oligonucleotide
  misc_feature 1..20: note = Target: ANGPTL3; (+) strand; PAM type: YTN; PAM sequence: CTG
  source 1..20: mol_type = other DNA
gacctgtgtctttcaagctc

SEQ ID NO: 16410 - DNA, 20 bp, synthetic construct
  misc_feature 1..20: note = Description of Artificial Sequence: Synthetic oligonucleotide
  misc_feature 1..20: note = Target: ANGPTL3; (+) strand; PAM type: YTN; PAM sequence: CTG
  source 1..20: mol_type = other DNA
tgtctttcaagctcatctac

SEQ ID NO: 16411 - DNA, 20 bp, synthetic construct
  misc_feature 1..20: note = Description of Artificial Sequence: Synthetic oligonucleotide
  misc_feature 1..20: note = Target: ANGPTL3; (+) strand; PAM type: YTN; PAM sequence: CTT
  source 1..20: mol_type = other DNA
tcaagctcatctactgaaga

SEQ ID NO: 16412 - DNA, 20 bp, synthetic construct
  misc_feature 1..20: note = Description of Artificial Sequence: Synthetic oligonucleotide
  misc_feature 1..20: note = Target: ANGPTL3; (+) strand; PAM type: YTN; PAM sequence: TTT
  source 1..20: mol_type = other DNA
caagctcatctactgaagaa

SEQ ID NO: 16413 - DNA, 20 bp, synthetic construct
  misc_feature 1..20: note = Description of Artificial Sequence: Synthetic oligonucleotide
  misc_feature 1..20: note = Target: ANGPTL3; (+) strand; PAM type: YTN; PAM sequence: TTC
  source 1..20: mol_type = other DNA
aagctcatctactgaagaag

SEQ ID NO: 16414 - DNA, 20 bp, synthetic construct
  misc_feature 1..20: note = Description of Artificial Sequence: Synthetic oligonucleotide
  misc_feature 1..20: note = Target: ANGPTL3; (+) strand; PAM type: YTN; PAM sequence: CTC
  source 1..20: mol_type = other DNA
atctactgaagaagtgtaac

SEQ ID NO: 16415 - DNA, 20 bp, synthetic construct
  misc_feature 1..20: note = Description of Artificial Sequence: Synthetic oligonucleotide
  misc_feature 1..20: note = Target: ANGPTL3; (+) strand; PAM type: YTN; PAM sequence: CTA
  source 1..20: mol_type = other DNA
ctgaagaagtgtaacagcag

SEQ ID NO: 16416 - DNA, 20 bp, synthetic construct
  misc_feature 1..20: note = Description of Artificial Sequence: Synthetic oligonucleotide
  misc_feature 1..20: note = Target: ANGPTL3; (+) strand; PAM type: YTN; PAM sequence: CTG
  source 1..20: mol_type = other DNA
aagaagtgtaacagcagagg

SEQ ID NO: 16417 - DNA, 20 bp, synthetic construct
  misc_feature 1..20: note = Description of Artificial Sequence: Synthetic oligonucleotide
  misc_feature 1..20: note = Target: ANGPTL3; (+) strand; PAM type: YTN; PAM sequence: CTT
  source 1..20: mol_type = other DNA
ttattgtctggagttacagg

SEQ ID NO: 16418 - DNA, 20 bp, synthetic construct
  misc_feature 1..20: note = Description of Artificial Sequence: Synthetic oligonucleotide
  misc_feature 1..20: note = Target: ANGPTL3; (+) strand; PAM type: YTN; PAM sequence: TTT
  source 1..20: mol_type = other DNA
tattgtctggagttacagga

SEQ ID NO: 16419 - DNA, 20 bp, synthetic construct
  misc_feature 1..20: note = Description of Artificial Sequence: Synthetic oligonucleotide
  misc_feature 1..20: note = Target: ANGPTL3; (+) strand; PAM type: YTN; PAM sequence: TTT
  source 1..20: mol_type = other DNA
attgtctggagttacaggat

SEQ ID NO: 16420 - DNA, 20 bp, synthetic construct
  misc_feature 1..20: note = Description of Artificial Sequence: Synthetic oligonucleotide
  misc_feature 1..20: note = Target: ANGPTL3; (+) strand; PAM type: YTN; PAM sequence: TTA
  source 1..20: mol_type = other DNA
ttgtctggagttacaggata

SEQ ID NO: 16421 - DNA, 20 bp, synthetic construct
  misc_feature 1..20: note = Description of Artificial Sequence: Synthetic oligonucleotide
  misc_feature 1..20: note = Target: ANGPTL3; (+) strand; PAM type: YTN; PAM sequence: TTG
  source 1..20: mol_type = other DNA
tctggagttacaggataaaa

SEQ ID NO: 16422 - DNA, 20 bp, synthetic construct
  misc_feature 1..20: note = Description of Artificial Sequence: Synthetic oligonucleotide
  misc_feature 1..20: note = Target: ANGPTL3; (+) strand; PAM type: YTN; PAM sequence: CTG
  source 1..20: mol_type = other DNA
gagttacaggataaaataac

SEQ ID NO: 16423 - DNA, 20 bp, synthetic construct
  misc_feature 1..20: note = Description of Artificial Sequence: Synthetic oligonucleotide
  misc_feature 1..20: note = Target: ANGPTL3; (+) strand; PAM type: YTN; PAM sequence: TTA
  source 1..20: mol_type = other DNA
caggataaaataacttacta

SEQ ID NO: 16424 - DNA, 20 bp, synthetic construct
  misc_feature 1..20: note = Description of Artificial Sequence: Synthetic oligonucleotide
  misc_feature 1..20: note = Target: ANGPTL3; (+) strand; PAM type: YTN; PAM sequence: CTT
  source 1..20: mol_type = other DNA
actatatgcacaaatttctt

SEQ ID NO: 16425 - DNA, 20 bp, synthetic construct
  misc_feature 1..20: note = Description of Artificial Sequence: Synthetic oligonucleotide
  misc_feature 1..20: note = Target: ANGPTL3; (+) strand; PAM type: YTN; PAM sequence: TTA
  source 1..20: mol_type = other DNA
ctatatgcacaaatttcttt

SEQ ID NO: 16426 - DNA, 20 bp, synthetic construct
  misc_feature 1..20: note = Description of Artificial Sequence: Synthetic oligonucleotide
  misc_feature 1..20: note = Target: ANGPTL3; (+) strand; PAM type: YTN; PAM sequence: CTA
  source 1..20: mol_type = other DNA
tatgcacaaatttctttcag

SEQ ID NO: 16427 - DNA, 20 bp, synthetic construct
  misc_feature 1..20: note = Description of Artificial Sequence: Synthetic oligonucleotide
  misc_feature 1..20: note = Target: ANGPTL3; (+) strand; PAM type: YTN; PAM sequence: TTT
  source 1..20: mol_type = other DNA
ctttcagaatcttattggga

SEQ ID NO: 16428 - DNA, 20 bp, synthetic construct
  misc_feature 1..20: note = Description of Artificial Sequence: Synthetic oligonucleotide
  misc_feature 1..20: note = Target: ANGPTL3; (+) strand; PAM type: YTN; PAM sequence: TTC
  source 1..20: mol_type = other DNA
tttcagaatcttattgggat

SEQ ID NO: 16429 - DNA, 20 bp, synthetic construct
  misc_feature 1..20: note = Description of Artificial Sequence: Synthetic oligonucleotide
  misc_feature 1..20: note = Target: ANGPTL3; (+) strand; PAM type: YTN; PAM sequence: CTT
  source 1..20: mol_type = other DNA
tcagaatcttattgggatct

SEQ ID NO: 16430 - DNA, 20 bp, synthetic construct
  misc_feature 1..20: note = Description of Artificial Sequence: Synthetic oligonucleotide
  misc_feature 1..20: note = Target: ANGPTL3; (+) strand; PAM type: YTN; PAM sequence: TTT
  source 1..20: mol_type = other DNA
cagaatcttattgggatctt

SEQ ID NO: 16431 - DNA, 20 bp, synthetic construct
  misc_feature 1..20: note = Description of Artificial Sequence: Synthetic oligonucleotide
  misc_feature 1..20: note = Target: ANGPTL3; (+) strand; PAM type: YTN; PAM sequence: TTC
  source 1..20: mol_type = other DNA
agaatcttattgggatctta

SEQ ID NO: 16432 - DNA, 20 bp, synthetic construct
  misc_feature 1..20: note = Description of Artificial Sequence: Synthetic oligonucleotide
  misc_feature 1..20: note = Target: ANGPTL3; (+) strand; PAM type: YTN; PAM sequence: CTT
  source 1..20: mol_type = other DNA
attgggatcttagcttaaat

SEQ ID NO: 16433 - DNA, 20 bp, synthetic construct
  misc_feature 1..20: note = Description of Artificial Sequence: Synthetic oligonucleotide
  misc_feature 1..20: note = Target: ANGPTL3; (+) strand; PAM type: YTN; PAM sequence: TTA
  source 1..20: mol_type = other DNA
ttgggatcttagcttaaatc

SEQ ID NO: 16434 - DNA, 20 bp, synthetic construct
  misc_feature 1..20: note = Description of Artificial Sequence: Synthetic oligonucleotide
  misc_feature 1..20: note = Target: ANGPTL3; (+) strand; PAM type: YTN; PAM sequence: TTG
  source 1..20: mol_type = other DNA
ggatcttagcttaaatctta

SEQ ID NO: 16435 - DNA, 20 bp, synthetic construct
  misc_feature 1..20: note = Description of Artificial Sequence: Synthetic oligonucleotide
  misc_feature 1..20: note = Target: ANGPTL3; (+) strand; PAM type: YTN; PAM sequence: CTT
  source 1..20: mol_type = other DNA
agcttaaatcttagaatttt

SEQ ID NO: 16436 - DNA, 20 bp, synthetic construct
  misc_feature 1..20: note = Description of Artificial Sequence: Synthetic oligonucleotide
  misc_feature 1..20: note = Target: ANGPTL3; (+) strand; PAM type: YTN; PAM sequence: TTA
  source 1..20: mol_type = other DNA
gcttaaatcttagaatttta

SEQ ID NO: 16437 - DNA, 20 bp, synthetic construct
  misc_feature 1..20: note = Description of Artificial Sequence: Synthetic oligonucleotide
  misc_feature 1..20: note = Target: ANGPTL3; (+) strand; PAM type: YTN; PAM sequence: CTT
  source 1..20: mol_type = other DNA
aaatcttagaattttacttt

SEQ ID NO: 16438 - DNA, 20 bp, synthetic construct
  misc_feature 1..20: note = Description of Artificial Sequence: Synthetic oligonucleotide
  misc_feature 1..20: note = Target: ANGPTL3; (+) strand; PAM type: YTN; PAM sequence: TTA
  source 1..20: mol_type = other DNA
aatcttagaattttacttta

SEQ ID NO: 16439 - DNA, 20 bp, synthetic construct
  misc_feature 1..20: note = Description of Artificial Sequence: Synthetic oligonucleotide
  misc_feature 1..20: note = Target: ANGPTL3; (+) strand; PAM type: YTN; PAM sequence: CTT
  source 1..20: mol_type = other DNA
agaattttactttaaaattg

SEQ ID NO: 16440 - DNA, 20 bp, synthetic construct
  misc_feature 1..20: note = Description of Artificial Sequence: Synthetic oligonucleotide
  misc_feature 1..20: note = Target: ANGPTL3; (+) strand; PAM type: YTN; PAM sequence: TTA
  source 1..20: mol_type = other DNA
gaattttactttaaaattgc

SEQ ID NO: 16441 - DNA, 20 bp, synthetic construct
  misc_feature 1..20: note = Description of Artificial Sequence: Synthetic oligonucleotide
  misc_feature 1..20: note = Target: ANGPTL3; (+) strand; PAM type: YTN; PAM sequence: TTT
  source 1..20: mol_type = other DNA
tactttaaaattgcatatga

SEQ ID NO: 16442 - DNA, 20 bp, synthetic construct
  misc_feature 1..20: note = Description of Artificial Sequence: Synthetic oligonucleotide
  misc_feature 1..20: note = Target: ANGPTL3; (+) strand; PAM type: YTN; PAM sequence: TTT
  source 1..20: mol_type = other DNA
actttaaaattgcatatgaa

SEQ ID NO: 16443 - DNA, 20 bp, synthetic construct
  misc_feature 1..20: note = Description of Artificial Sequence: Synthetic oligonucleotide
  misc_feature 1..20: note = Target: ANGPTL3; (+) strand; PAM type: YTN; PAM sequence: TTA
  source 1..20: mol_type = other DNA
ctttaaaattgcatatgaat

SEQ ID NO: 16444 - DNA, 20 bp, synthetic construct
  misc_feature 1..20: note = Description of Artificial Sequence: Synthetic oligonucleotide
  misc_feature 1..20: note = Target: ANGPTL3; (+) strand; PAM type: YTN; PAM sequence: CTT
  source 1..20: mol_type = other DNA
taaaattgcatatgaattgt

SEQ ID NO: 16445 - DNA, 20 bp, synthetic construct
  misc_feature 1..20: note = Description of Artificial Sequence: Synthetic oligonucleotide
  misc_feature 1..20: note = Target: ANGPTL3; (+) strand; PAM type: YTN; PAM sequence: TTT
  source 1..20: mol_type = other DNA
aaaattgcatatgaattgtg

SEQ ID NO: 16446 - DNA, 20 bp, synthetic construct
  misc_feature 1..20: note = Description of Artificial Sequence: Synthetic oligonucleotide
  misc_feature 1..20: note = Target: ANGPTL3; (+) strand; PAM type: YTN; PAM sequence: TTA
  source 1..20: mol_type = other DNA
aaattgcatatgaattgtgt

SEQ ID NO: 16447 - DNA, 20 bp, synthetic construct
  misc_feature 1..20: note = Description of Artificial Sequence: Synthetic oligonucleotide
  misc_feature 1..20: note = Target: ANGPTL3; (+) strand; PAM type: YTN; PAM sequence: TTG
  source 1..20: mol_type = other DNA
catatgaattgtgttttata

SEQ ID NO: 16448 - DNA, 20 bp, synthetic construct
  misc_feature 1..20: note = Description of Artificial Sequence: Synthetic oligonucleotide
  misc_feature 1..20: note = Target: ANGPTL3; (+) strand; PAM type: YTN; PAM sequence: TTG
  source 1..20: mol_type = other DNA
tgttttatactttataaatc

SEQ ID NO: 16449 - DNA, 20 bp, synthetic construct
  misc_feature 1..20: note = Description of Artificial Sequence: Synthetic oligonucleotide
  misc_feature 1..20: note = Target: ANGPTL3; (+) strand; PAM type: YTN; PAM sequence: TTT
  source 1..20: mol_type = other DNA
tatactttataaatctatct

SEQ ID NO: 16450 - DNA, 20 bp, synthetic construct
  misc_feature 1..20: note = Description of Artificial Sequence: Synthetic oligonucleotide
  misc_feature 1..20: note = Target: ANGPTL3; (+) strand; PAM type: YTN; PAM sequence: TTT
  source 1..20: mol_type = other DNA
atactttataaatctatctt

SEQ ID NO: 16451 - DNA, 20 bp, synthetic construct
  misc_feature 1..20: note = Description of Artificial Sequence: Synthetic oligonucleotide
  misc_feature 1..20: note = Target: ANGPTL3; (+) strand; PAM type: YTN; PAM sequence: TTA
  source 1..20: mol_type = other DNA
tactttataaatctatcttc

SEQ ID NO: 16452 - DNA, 20 bp, synthetic construct
  misc_feature 1..20: note = Description of Artificial Sequence: Synthetic oligonucleotide
  misc_feature 1..20: note = Target: ANGPTL3; (+) strand; PAM type: YTN; PAM sequence: CTT
  source 1..20: mol_type = other DNA
tataaatctatcttcatgcc

SEQ ID NO: 16453 - DNA, 20 bp, synthetic construct
  misc_feature 1..20: note = Description of Artificial Sequence: Synthetic oligonucleotide
  misc_feature 1..20: note = Target: ANGPTL3; (+) strand; PAM type: YTN; PAM sequence: TTT
  source 1..20: mol_type = other DNA
ataaatctatcttcatgcct

SEQ ID NO: 16454 - DNA, 20 bp, synthetic construct
  misc_feature 1..20: note = Description of Artificial Sequence: Synthetic oligonucleotide
  misc_feature 1..20: note = Target: ANGPTL3; (+) strand; PAM type: YTN; PAM sequence: TTA
  source 1..20: mol_type = other DNA
taaatctatcttcatgcctg

SEQ ID NO: 16455 - DNA, 20 bp, synthetic construct
  misc_feature 1..20: note = Description of Artificial Sequence: Synthetic oligonucleotide
  misc_feature 1..20: note = Target: ANGPTL3; (+) strand; PAM type: YTN; PAM sequence: CTA
  source 1..20: mol_type = other DNA
tcttcatgcctgcagtggct

SEQ ID NO: 16456 - DNA, 20 bp, synthetic construct
  misc_feature 1..20: note = Description of Artificial Sequence: Synthetic oligonucleotide
  misc_feature 1..20: note = Target: ANGPTL3; (+) strand; PAM type: YTN; PAM sequence: CTT
  source 1..20: mol_type = other DNA
catgcctgcagtggctcaca

SEQ ID NO: 16457 - DNA, 20 bp, synthetic construct
  misc_feature 1..20: note = Description of Artificial Sequence: Synthetic oligonucleotide
  misc_feature 1..20: note = Target: ANGPTL3; (+) strand; PAM type: YTN; PAM sequence: TTC
  source 1..20: mol_type = other DNA
atgcctgcagtggctcacac

SEQ ID NO: 16458 - DNA, 20 bp, synthetic construct
  misc_feature 1..20: note = Description of Artificial Sequence: Synthetic oligonucleotide
  misc_feature 1..20: note = Target: ANGPTL3; (+) strand; PAM type: YTN; PAM sequence: CTG
  source 1..20: mol_type = other DNA
cagtggctcacacctgtaat

SEQ ID NO: 16459 - DNA, 20 bp, synthetic construct
  misc_feature 1..20: note = Description of Artificial Sequence: Synthetic oligonucleotide
  misc_feature 1..20: note = Target: ANGPTL3; (+) strand; PAM type: YTN; PAM sequence: CTC
  source 1..20: mol_type = other DNA
acacctgtaatccaagtatt

SEQ ID NO: 16460 - DNA, 20 bp, synthetic construct
  misc_feature 1..20: note = Description of Artificial Sequence: Synthetic oligonucleotide
  misc_feature 1..20: note = Target: ANGPTL3; (+) strand; PAM type: YTN; PAM sequence: CTG
  source 1..20: mol_type = other DNA
taatccaagtattttgggag

SEQ ID NO: 16461 - DNA, 20 bp, synthetic construct
  misc_feature 1..20: note = Description of Artificial Sequence: Synthetic oligonucleotide
  misc_feature 1..20: note = Target: ANGPTL3; (+) strand; PAM type: YTN; PAM sequence: TTT
  source 1..20: mol_type = other DNA
tgggaggccggggcgggagt

SEQ ID NO: 16462 - DNA, 20 bp, synthetic construct
  misc_feature 1..20: note = Description of Artificial Sequence: Synthetic oligonucleotide
  misc_feature 1..20: note = Target: ANGPTL3; (+) strand; PAM type: YTN; PAM sequence: TTT
  source 1..20: mol_type = other DNA
gggaggccggggcgggagta

SEQ ID NO: 16463 - DNA, 20 bp, synthetic construct
  misc_feature 1..20: note = Description of Artificial Sequence: Synthetic oligonucleotide
  misc_feature 1..20: note = Target: ANGPTL3; (+) strand; PAM type: YTN; PAM sequence: TTG
  source 1..20: mol_type = other DNA
ggaggccggggcgggagtac

SEQ ID NO: 16464 - DNA, 20 bp, synthetic construct
  misc_feature 1..20: note = Description of Artificial Sequence: Synthetic oligonucleotide
  misc_feature 1..20: note = Target: ANGPTL3; (+) strand; PAM type: YTN; PAM sequence: CTG
  source 1..20: mol_type = other DNA
cttgaacccaggagtccaag

SEQ ID NO: 16465 - DNA, 20 bp, synthetic construct
  misc_feature 1..20: note = Description of Artificial Sequence: Synthetic oligonucleotide
  misc_feature 1..20: note = Target: ANGPTL3; (+) strand; PAM type: YTN; PAM sequence: CTT
  source 1..20: mol_type = other DNA
gaacccaggagtccaagatc

SEQ ID NO: 16466 - DNA, 20 bp, synthetic construct
  misc_feature 1..20: note = Description of Artificial Sequence: Synthetic oligonucleotide
  misc_feature 1..20: note = Target: ANGPTL3; (+) strand; PAM type: YTN; PAM sequence: TTG
  source 1..20: mol_type = other DNA
aacccaggagtccaagatca

SEQ ID NO: 16467 - DNA, 20 bp, synthetic construct
  misc_feature 1..20: note = Description of Artificial Sequence: Synthetic oligonucleotide
  misc_feature 1..20: note = Target: ANGPTL3; (+) strand; PAM type: YTN; PAM sequence: CTG
  source 1..20: mol_type = other DNA
tgcaacacggcaaaactcca

SEQ ID NO: 16468 - DNA, 20 bp, synthetic construct
  misc_feature 1..20: note = Description of Artificial Sequence: Synthetic oligonucleotide
  misc_feature 1..20: note = Target: ANGPTL3; (+) strand; PAM type: YTN; PAM sequence: CTC
  source 1..20: mol_type = other DNA
cacctctacaaaaaatacaa

SEQ ID NO: 16469 - DNA, 20 bp, synthetic construct
  misc_feature 1..20: note = Description of Artificial Sequence: Synthetic oligonucleotide
  misc_feature 1..20: note = Target: ANGPTL3; (+) strand; PAM type: YTN; PAM sequence: CTC
  source 1..20: mol_type = other DNA
tacaaaaaatacaaaaatta

SEQ ID NO: 16470 - DNA, 20 bp, synthetic construct
  misc_feature 1..20: note = Description of Artificial Sequence: Synthetic oligonucleotide
  misc_feature 1..20: note = Target: ANGPTL3; (+) strand; PAM type: YTN; PAM sequence: CTA
  source 1..20: mol_type = other DNA
caaaaaatacaaaaattagc

SEQ ID NO: 16471 - DNA, 20 bp, synthetic construct
  misc_feature 1..20: note = Description of Artificial Sequence: Synthetic oligonucleotide
  misc_feature 1..20: note = Target: ANGPTL3; (+) strand; PAM type: YTN; PAM sequence: TTA
  source 1..20: mol_type = other DNA
gctgggtgtggtggcaggtg

SEQ ID NO: 16472 - DNA, 20 bp, synthetic construct
  misc_feature 1..20: note = Description of Artificial Sequence: Synthetic oligonucleotide
  misc_feature 1..20: note = Target: ANGPTL3; (+) strand; PAM type: YTN; PAM sequence: CTG
  source 1..20: mol_type = other DNA
ggtgtggtggcaggtgcctg

SEQ ID NO: 16473 - DNA, 20 bp, synthetic construct
  misc_feature 1..20: note = Description of Artificial Sequence: Synthetic oligonucleotide
  misc_feature 1..20: note = Target: ANGPTL3; (+) strand; PAM type: YTN; PAM sequence: CTG
  source 1..20: mol_type = other DNA
taatcccaactacttgggag

SEQ ID NO: 16474 - DNA, 20 bp, synthetic construct
  misc_feature 1..20: note = Description of Artificial Sequence: Synthetic oligonucleotide
  misc_feature 1..20: note = Target: ANGPTL3; (+) strand; PAM type: YTN; PAM sequence: CTA
  source 1..20: mol_type = other DNA
cttgggaggctgaggcagga

SEQ ID NO: 16475 - DNA, 20 bp, synthetic construct
  misc_feature 1..20: note = Description of Artificial Sequence: Synthetic oligonucleotide
  misc_feature 1..20: note = Target: ANGPTL3; (+) strand; PAM type: YTN; PAM sequence: CTT
  source 1..20: mol_type = other DNA
gggaggctgaggcaggagaa

SEQ ID NO: 16476 - DNA, 20 bp, synthetic construct
  misc_feature 1..20: note = Description of Artificial Sequence: Synthetic oligonucleotide
  misc_feature 1..20: note = Target: ANGPTL3; (+) strand; PAM type: YTN; PAM sequence: TTG
  source 1..20: mol_type = other DNA
ggaggctgaggcaggagaat

SEQ ID NO: 16477 - DNA, 20 bp, synthetic construct
  misc_feature 1..20: note = Description of Artificial Sequence: Synthetic oligonucleotide
  misc_feature 1..20: note = Target: ANGPTL3; (+) strand; PAM type: YTN; PAM sequence: CTG
  source 1..20: mol_type = other DNA
aggcaggagaatcgctggag

SEQ ID NO: 16478 - DNA, 20 bp, synthetic construct
  misc_feature 1..20: note = Description of Artificial Sequence: Synthetic oligonucleotide
  misc_feature 1..20: note = Target: ANGPTL3; (+) strand; PAM type: YTN; PAM sequence: CTG
  source 1..20: mol_type = other DNA
gagcctgggaagtcaagcct

SEQ ID NO: 16479 - DNA, 20 bp, synthetic construct
  misc_feature 1..20: note = Description of Artificial Sequence: Synthetic oligonucleotide
  misc_feature 1..20: note = Target: ANGPTL3; (+) strand; PAM type: YTN; PAM sequence: CTG
  source 1..20: mol_type = other DNA
ggaagtcaagcctgcagcga

SEQ ID NO: 16480 - DNA, 20 bp, synthetic construct
  misc_feature 1..20: note = Description of Artificial Sequence: Synthetic oligonucleotide
  misc_feature 1..20: note = Target: ANGPTL3; (+) strand; PAM type: YTN; PAM sequence: CTG
  source 1..20: mol_type = other DNA
cagcgaaccatgatcctaac

SEQ ID NO: 16481 - DNA, 20 bp, synthetic construct
  misc_feature 1..20: note = Description of Artificial Sequence: Synthetic oligonucleotide
  misc_feature 1..20: note = Target: ANGPTL3; (+) strand; PAM type: YTN; PAM sequence: CTA
  source 1..20: mol_type = other DNA
acactgcattctagcctggg

SEQ ID NO: 16482 - DNA, 20 bp, synthetic construct
  misc_feature 1..20: note = Description of Artificial Sequence: Synthetic oligonucleotide
  misc_feature 1..20: note = Target: ANGPTL3; (+) strand; PAM type: YTN; PAM sequence: CTG
  source 1..20: mol_type = other DNA
cattctagcctgggcaacag

SEQ ID NO: 16483 - DNA, 20 bp, synthetic construct
  misc_feature 1..20: note = Description of Artificial Sequence: Synthetic oligonucleotide
  misc_feature 1..20: note = Target: ANGPTL3; (+) strand; PAM type: YTN; PAM sequence: TTC
  source 1..20: mol_type = other DNA
tagcctgggcaacagagtga

SEQ ID NO: 16484 - DNA, 20 bp, synthetic construct
  misc_feature 1..20: note = Description of Artificial Sequence: Synthetic oligonucleotide
  misc_feature 1..20: note = Target: ANGPTL3; (+) strand; PAM type: YTN; PAM sequence: CTA
  source 1..20: mol_type = other DNA
gcctgggcaacagagtgaga

SEQ ID NO: 16485 - DNA, 20 bp, synthetic construct
  misc_feature 1..20: note = Description of Artificial Sequence: Synthetic oligonucleotide
  misc_feature 1..20: note = Target: ANGPTL3; (+) strand; PAM type: YTN; PAM sequence: CTG
  source 1..20: mol_type = other DNA
ggcaacagagtgagactctg

SEQ ID NO: 16486 - DNA, 20 bp, synthetic construct
  misc_feature 1..20: note = Description of Artificial Sequence: Synthetic oligonucleotide
  misc_feature 1..20: note = Target: ANGPTL3; (+) strand; PAM type: YTN; PAM sequence: CTC
  source 1..20: mol_type = other DNA
tgtctcaaaaaaaatcttca

SEQ ID NO: 16487 - DNA, 20 bp, synthetic construct
  misc_feature 1..20: note = Description of Artificial Sequence: Synthetic oligonucleotide
  misc_feature 1..20: note = Target: ANGPTL3; (+) strand; PAM type: YTN; PAM sequence: CTG
  source 1..20: mol_type = other DNA
tctcaaaaaaaatcttcata

SEQ ID NO: 16488 - DNA, 20 bp, synthetic construct
  misc_feature 1..20: note = Description of Artificial Sequence: Synthetic oligonucleotide
  misc_feature 1..20: note = Target: ANGPTL3; (+) strand; PAM type: YTN; PAM sequence: CTC
  source 1..20: mol_type = other DNA
aaaaaaaatcttcatataaa

SEQ ID NO: 16489 - DNA, 20 bp, synthetic construct
  misc_feature 1..20: note = Description of Artificial Sequence: Synthetic oligonucleotide
  misc_feature 1..20: note = Target: ANGPTL3; (+) strand; PAM type: YTN; PAM sequence: CTT
  source 1..20: mol_type = other DNA
catataaaaatatttatttc

SEQ ID NO: 16490 - DNA, 20 bp, synthetic construct
  misc_feature 1..20: note = Description of Artificial Sequence: Synthetic oligonucleotide
  misc_feature 1..20: note = Target: ANGPTL3; (+) strand; PAM type: YTN; PAM sequence: TTC
  source 1..20: mol_type = other DNA
atataaaaatatttatttcc

SEQ ID NO: 16491 - DNA, 20 bp, synthetic construct
  misc_feature 1..20: note = Description of Artificial Sequence: Synthetic oligonucleotide
  misc_feature 1..20: note = Target: ANGPTL3; (+) strand; PAM type: YTN; PAM sequence: TTT
  source 1..20: mol_type = other DNA
atttccccccaagtatttaa

SEQ ID NO: 16492 - DNA, 20 bp, synthetic construct
  misc_feature 1..20: note = Description of Artificial Sequence: Synthetic oligonucleotide
  misc_feature 1..20: note = Target: ANGPTL3; (+) strand; PAM type: YTN; PAM sequence: TTA
  source 1..20: mol_type = other DNA
tttccccccaagtatttaaa

SEQ ID NO: 16493 - DNA, 20 bp, synthetic construct
  misc_feature 1..20: note = Description of Artificial Sequence: Synthetic oligonucleotide
  misc_feature 1..20: note = Target: ANGPTL3; (+) strand; PAM type: YTN; PAM sequence: TTT
  source 1..20: mol_type = other DNA
ccccccaagtatttaaaaag

SEQ ID NO: 16494 - DNA, 20 bp, synthetic construct
  misc_feature 1..20: note = Description of Artificial Sequence: Synthetic oligonucleotide
  misc_feature 1..20: note = Target: ANGPTL3; (+) strand; PAM type: YTN; PAM sequence: TTC
  source 1..20: mol_type = other DNA
cccccaagtatttaaaaagt

SEQ ID NO: 16495 - DNA, 20 bp, synthetic construct
  misc_feature 1..20: note = Description of Artificial Sequence: Synthetic oligonucleotide
  misc_feature 1..20: note = Target: ANGPTL3; (+) strand; PAM type: YTN; PAM sequence: TTT
  source 1..20: mol_type = other DNA
aaaaagtgatgttcctagaa

SEQ ID NO: 16496 - DNA, 20 bp, synthetic construct
  misc_feature 1..20: note = Description of Artificial Sequence: Synthetic oligonucleotide
  misc_feature 1..20: note = Target: ANGPTL3; (+) strand; PAM type: YTN; PAM sequence: TTA
  source 1..20: mol_type = other DNA
aaaagtgatgttcctagaag

SEQ ID NO: 16497 - DNA, 20 bp, synthetic construct
  misc_feature 1..20: note = Description of Artificial Sequence: Synthetic oligonucleotide
  misc_feature 1..20: note = Target: ANGPTL3; (+) strand; PAM type: YTN; PAM sequence: TTC
  source 1..20: mol_type = other DNA
ctagaagatgtgtcatgttt

SEQ ID NO: 16498 - DNA, 20 bp, synthetic construct
  misc_feature 1..20: note = Description of Artificial Sequence: Synthetic oligonucleotide
  misc_feature 1..20: note = Target: ANGPTL3; (+) strand; PAM type: YTN; PAM sequence: CTA
  source 1..20: mol_type = other DNA
gaagatgtgtcatgtttatc

SEQ ID NO: 16499 - DNA, 20 bp, synthetic construct
  misc_feature 1..20: note = Description of Artificial Sequence: Synthetic oligonucleotide
  misc_feature 1..20: note = Target: ANGPTL3; (+) strand; PAM type: YTN; PAM sequence: TTT
  source 1..20: mol_type = other DNA
atcctgtgaacttgcacgtc

SEQ ID NO: 16500 - DNA, 20 bp, synthetic construct
  misc_feature 1..20: note = Description of Artificial Sequence: Synthetic oligonucleotide
  misc_feature 1..20: note = Target: ANGPTL3; (+) strand; PAM type: YTN; PAM sequence: TTA
  source 1..20: mol_type = other DNA
tcctgtgaacttgcacgtcc

SEQ ID NO: 16501 - DNA, 20 bp, synthetic construct
  misc_feature 1..20: note = Description of Artificial Sequence: Synthetic oligonucleotide
  misc_feature 1..20: note = Target: ANGPTL3; (+) strand; PAM type: YTN; PAM sequence: CTG
  source 1..20: mol_type = other DNA
tgaacttgcacgtcccatat

SEQ ID NO: 16502 - DNA, 20 bp, synthetic construct
  misc_feature 1..20: note = Description of Artificial Sequence: Synthetic oligonucleotide
  misc_feature 1..20: note = Target: ANGPTL3; (+) strand; PAM type: YTN; PAM sequence: CTT
  source 1..20: mol_type = other DNA
gcacgtcccatatagttgtg

SEQ ID NO: 16503 - DNA, 20 bp, synthetic construct
  misc_feature 1..20: note = Description of Artificial Sequence: Synthetic oligonucleotide
  misc_feature 1..20: note = Target: ANGPTL3; (+) strand; PAM type: YTN; PAM sequence: TTG
  source 1..20: mol_type = other DNA
cacgtcccatatagttgtgc

SEQ ID NO: 16504 - DNA, 20 bp, synthetic construct
  misc_feature 1..20: note = Description of Artificial Sequence: Synthetic oligonucleotide
  misc_feature 1..20: note = Target: ANGPTL3; (+) strand; PAM type: YTN; PAM sequence: TTG
  source 1..20: mol_type = other DNA
tgccctcacaagaatgtata

SEQ ID NO: 16505 - DNA, 20 bp, synthetic construct
  misc_feature 1..20: note = Description of Artificial Sequence: Synthetic oligonucleotide
  misc_feature 1..20: note = Target: ANGPTL3; (+) strand; PAM type: YTN; PAM sequence: CTC
  source 1..20: mol_type = other DNA
acaagaatgtatactccaat

SEQ ID NO: 16506 - DNA, 20 bp, synthetic construct
  misc_feature 1..20: note = Description of Artificial Sequence: Synthetic oligonucleotide
  misc_feature 1..20: note = Target: ANGPTL3; (+) strand; PAM type: YTN; PAM sequence: CTC
  source 1..20: mol_type = other DNA
caattagaagagtataggcc

SEQ ID NO: 16507 - DNA, 20 bp, synthetic construct
  misc_feature 1..20: note = Description of Artificial Sequence: Synthetic oligonucleotide
  misc_feature 1..20: note = Target: ANGPTL3; (+) strand; PAM type: YTN; PAM sequence: TTA
  source 1..20: mol_type = other DNA
gaagagtataggcctttgga

SEQ ID NO: 16508 - DNA, 20 bp, synthetic construct
  misc_feature 1..20: note = Description of Artificial Sequence: Synthetic oligonucleotide
  misc_feature 1..20: note = Target: ANGPTL3; (+) strand; PAM type: YTN; PAM sequence: CTT
  source 1..20: mol_type = other DNA
tggaacaaaatccaaaatcc

SEQ ID NO: 16509 - DNA, 20 bp, synthetic construct
  misc_feature 1..20: note = Description of Artificial Sequence: Synthetic oligonucleotide
  misc_feature 1..20: note = Target: ANGPTL3; (+) strand; PAM type: YTN; PAM sequence: TTT
  source 1..20: mol_type = other DNA
ggaacaaaatccaaaatcct

SEQ ID NO: 16510 - DNA, 20 bp, synthetic construct
  misc_feature 1..20: note = Description of Artificial Sequence: Synthetic oligonucleotide
  misc_feature 1..20: note = Target: ANGPTL3; (+) strand; PAM type: YTN; PAM sequence: TTG
  source 1..20: mol_type = other DNA
gaacaaaatccaaaatcctt

SEQ ID NO: 16511 - DNA, 20 bp, synthetic construct
  misc_feature 1..20: note = Description of Artificial Sequence: Synthetic oligonucleotide
  misc_feature 1..20: note = Target: ANGPTL3; (+) strand; PAM type: YTN; PAM sequence: CTT
  source 1..20: mol_type = other DNA
ccaggttttcaaaagtctct

SEQ ID NO: 16512 - DNA, 20 bp, synthetic construct
  misc_feature 1..20: note = Description of Artificial Sequence: Synthetic oligonucleotide
  misc_feature 1..20: note = Target: ANGPTL3; (+) strand; PAM type: YTN; PAM sequence: TTC
  source 1..20: mol_type = other DNA
caggttttcaaaagtctcta

SEQ ID NO: 16513 - DNA, 20 bp, synthetic construct
  misc_feature 1..20: note = Description of Artificial Sequence: Synthetic oligonucleotide
  misc_feature 1..20: note = Target: ANGPTL3; (+) strand; PAM type: YTN; PAM sequence: TTT
  source 1..20: mol_type = other DNA
tcaaaagtctctatcacctg

SEQ ID NO: 16514 - DNA, 20 bp, synthetic construct
  misc_feature 1..20: note = Description of Artificial Sequence: Synthetic oligonucleotide
  misc_feature 1..20: note = Target: ANGPTL3; (+) strand; PAM type: YTN; PAM sequence: TTT
  source 1..20: mol_type = other DNA
caaaagtctctatcacctgg

SEQ ID NO: 16515 - DNA, 20 bp, synthetic construct
  misc_feature 1..20: note = Description of Artificial Sequence: Synthetic oligonucleotide
  misc_feature 1..20: note = Target: ANGPTL3; (+) strand; PAM type: YTN; PAM sequence: TTC
  source 1..20: mol_type = other DNA
aaaagtctctatcacctggc

SEQ ID NO: 16516 - DNA, 20 bp, synthetic construct
  misc_feature 1..20: note = Description of Artificial Sequence: Synthetic oligonucleotide
  misc_feature 1..20: note = Target: ANGPTL3; (+) strand; PAM type: YTN; PAM sequence: CTC
  source 1..20: mol_type = other DNA
tatcacctggccccaaatta

SEQ ID NO: 16517 - DNA, 20 bp, synthetic construct
  misc_feature 1..20: note = Description of Artificial Sequence: Synthetic oligonucleotide
  misc_feature 1..20: note = Target: ANGPTL3; (+) strand; PAM type: YTN; PAM sequence: CTA
  source 1..20: mol_type = other DNA
tcacctggccccaaattacc

SEQ ID NO: 16518 - DNA, 20 bp, synthetic construct
  misc_feature 1..20: note = Description of Artificial Sequence: Synthetic oligonucleotide
  misc_feature 1..20: note = Target: ANGPTL3; (+) strand; PAM type: YTN; PAM sequence: CTG
  source 1..20: mol_type = other DNA
gccccaaattacctcttcag

SEQ ID NO: 16519 - DNA, 20 bp, synthetic construct
  misc_feature 1..20: note = Description of Artificial Sequence: Synthetic oligonucleotide
  misc_feature 1..20: note = Target: ANGPTL3; (+) strand; PAM type: YTN; PAM sequence: TTA
  source 1..20: mol_type = other DNA
cctcttcagccattttttcc

SEQ ID NO: 16520 - DNA, 20 bp, synthetic construct
  misc_feature 1..20: note = Description of Artificial Sequence: Synthetic oligonucleotide
  misc_feature 1..20: note = Target: ANGPTL3; (+) strand; PAM type: YTN; PAM sequence: CTC
  source 1..20: mol_type = other DNA
ttcagccattttttcccaca

SEQ ID NO: 16521 - DNA, 20 bp, synthetic construct
  misc_feature 1..20: note = Description of Artificial Sequence: Synthetic oligonucleotide
  misc_feature 1..20: note = Target: ANGPTL3; (+) strand; PAM type: YTN; PAM sequence: CTT
  source 1..20: mol_type = other DNA
cagccattttttcccacaac

SEQ ID NO: 16522 - DNA, 20 bp, synthetic construct
  misc_feature 1..20: note = Description of Artificial Sequence: Synthetic oligonucleotide
  misc_feature 1..20: note = Target: ANGPTL3; (+) strand; PAM type: YTN; PAM sequence: TTC
  source 1..20: mol_type = other DNA
agccattttttcccacaaca

SEQ ID NO: 16523 - DNA, 20 bp, synthetic construct
  misc_feature 1..20: note = Description of Artificial Sequence: Synthetic oligonucleotide
  misc_feature 1..20: note = Target: ANGPTL3; (+) strand; PAM type: YTN; PAM sequence: TTT
  source 1..20: mol_type = other DNA
tttcccacaacacaaacctt

SEQ ID NO: 16524 - DNA, 20 bp, synthetic construct
  misc_feature 1..20: note = Description of Artificial Sequence: Synthetic oligonucleotide
  misc_feature 1..20: note = Target: ANGPTL3; (+) strand; PAM type: YTN; PAM sequence: TTT
  source 1..20: mol_type = other DNA
ttcccacaacacaaaccttc

SEQ ID NO: 16525 - DNA, 20 bp, synthetic construct
  misc_feature 1..20: note = Description of Artificial Sequence: Synthetic oligonucleotide
  misc_feature 1..20: note = Target: ANGPTL3; (+) strand; PAM type: YTN; PAM sequence: TTT
  source 1..20: mol_type = other DNA
tcccacaacacaaaccttct

SEQ ID NO: 16526 - DNA, 20 bp, synthetic construct
  misc_feature 1..20: note = Description of Artificial Sequence: Synthetic oligonucleotide
  misc_feature 1..20: note = Target: ANGPTL3; (+) strand; PAM type: YTN; PAM sequence: TTT
  source 1..20: mol_type = other DNA
cccacaacacaaaccttctg

SEQ ID NO: 16527 - DNA, 20 bp, synthetic construct
  misc_feature 1..20: note = Description of Artificial Sequence: Synthetic oligonucleotide
  misc_feature 1..20: note = Target: ANGPTL3; (+) strand; PAM type: YTN; PAM sequence: TTC
  source 1..20: mol_type = other DNA
ccacaacacaaaccttctgc

SEQ ID NO: 16528 - DNA, 20 bp, synthetic construct
  misc_feature 1..20: note = Description of Artificial Sequence: Synthetic oligonucleotide
  misc_feature 1..20: note = Target: ANGPTL3; (+) strand; PAM type: YTN; PAM sequence: CTT
  source 1..20: mol_type = other DNA
ctgctctcatcaaaacgatc

SEQ ID NO: 16529 - DNA, 20 bp, synthetic construct
  misc_feature 1..20: note = Description of Artificial Sequence: Synthetic oligonucleotide
  misc_feature 1..20: note = Target: ANGPTL3; (+) strand; PAM type: YTN; PAM sequence: TTC
  source 1..20: mol_type = other DNA
tgctctcatcaaaacgatct

SEQ ID NO: 16530 - DNA, 20 bp, synthetic construct
  misc_feature 1..20: note = Description of Artificial Sequence: Synthetic oligonucleotide
  misc_feature 1..20: note = Target: ANGPTL3; (+) strand; PAM type: YTN; PAM sequence: CTG
  source 1..20: mol_type = other DNA
ctctcatcaaaacgatctac

SEQ ID NO: 16531 - DNA, 20 bp, synthetic construct
  misc_feature 1..20: note = Description of Artificial Sequence: Synthetic oligonucleotide
  misc_feature 1..20: note = Target: ANGPTL3; (+) strand; PAM type: YTN; PAM sequence: CTC
  source 1..20: mol_type = other DNA
tcatcaaaacgatctacttt

SEQ ID NO: 16532 - DNA, 20 bp, synthetic construct
  misc_feature 1..20: note = Description of Artificial Sequence: Synthetic oligonucleotide
  misc_feature 1..20: note = Target: ANGPTL3; (+) strand; PAM type: YTN; PAM sequence: CTC
  source 1..20: mol_type = other DNA
atcaaaacgatctactttta

SEQ ID NO: 16533 - DNA, 20 bp, synthetic construct
  misc_feature 1..20: note = Description of Artificial Sequence: Synthetic oligonucleotide
  misc_feature 1..20: note = Target: ANGPTL3; (+) strand; PAM type: YTN; PAM sequence: CTA
  source 1..20: mol_type = other DNA
cttttaaacatctcctctat

SEQ ID NO: 16534 - DNA, 20 bp, synthetic construct
  misc_feature 1..20: note = Description of Artificial Sequence: Synthetic oligonucleotide
  misc_feature 1..20: note = Target: ANGPTL3; (+) strand; PAM type: YTN; PAM sequence: CTT
  source 1..20: mol_type = other DNA
ttaaacatctcctctatgcc

SEQ ID NO: 16535 - DNA, 20 bp, synthetic construct
  misc_feature 1..20: note = Description of Artificial Sequence: Synthetic oligonucleotide
  misc_feature 1..20: note = Target: ANGPTL3; (+) strand; PAM type: YTN; PAM sequence: TTT
  source 1..20: mol_type = other DNA
taaacatctcctctatgcct

SEQ ID NO: 16536 - DNA, 20 bp, synthetic construct
  misc_feature 1..20: note = Description of Artificial Sequence: Synthetic oligonucleotide
  misc_feature 1..20: note = Target: ANGPTL3; (+) strand; PAM type: YTN; PAM sequence: TTT
  source 1..20: mol_type = other DNA
aaacatctcctctatgcctt

SEQ ID NO: 16537 - DNA, 20 bp, synthetic construct
  misc_feature 1..20: note = Description of Artificial Sequence: Synthetic oligonucleotide
  misc_feature 1..20: note = Target: ANGPTL3; (+) strand; PAM type: YTN; PAM sequence: TTA
  source 1..20: mol_type = other DNA
aacatctcctctatgccttc

SEQ ID NO: 16538 - DNA, 20 bp, synthetic construct
  misc_feature 1..20: note = Description of Artificial Sequence: Synthetic oligonucleotide
  misc_feature 1..20: note = Target: ANGPTL3; (+) strand; PAM type: YTN; PAM sequence: CTC
  source 1..20: mol_type = other DNA
ctctatgccttcctaatgta

SEQ ID NO: 16539 - DNA, 20 bp, synthetic construct
  misc_feature 1..20: note = Description of Artificial Sequence: Synthetic oligonucleotide
  misc_feature 1..20: note = Target: ANGPTL3; (+) strand; PAM type: YTN; PAM sequence: CTC
  source 1..20: mol_type = other DNA
tatgccttcctaatgtattc

SEQ ID NO: 16540 - DNA, 20 bp, synthetic construct
  misc_feature 1..20: note = Description of Artificial Sequence: Synthetic oligonucleotide
  misc_feature 1..20: note = Target: ANGPTL3; (+) strand; PAM type: YTN; PAM sequence: CTA
  source 1..20: mol_type = other DNA
tgccttcctaatgtattcca

SEQ ID NO: 16541 - DNA, 20 bp, synthetic construct
  misc_feature 1..20: note = Description of Artificial Sequence: Synthetic oligonucleotide
  misc_feature 1..20: note = Target: ANGPTL3; (+) strand; PAM type: YTN; PAM sequence: CTT
  source 1..20: mol_type = other DNA
cctaatgtattccatttgtc

SEQ ID NO: 16542 - DNA, 20 bp, synthetic construct
  misc_feature 1..20: note = Description of Artificial Sequence: Synthetic oligonucleotide
  misc_feature 1..20: note = Target: ANGPTL3; (+) strand; PAM type: YTN; PAM sequence: TTC
  source 1..20: mol_type = other DNA
ctaatgtattccatttgtct

SEQ ID NO: 16543 - DNA, 20 bp, synthetic construct
  misc_feature 1..20: note = Description of Artificial Sequence: Synthetic oligonucleotide
  misc_feature 1..20: note = Target: ANGPTL3; (+) strand; PAM type: YTN; PAM sequence: CTA
  source 1..20: mol_type = other DNA
atgtattccatttgtctaga

SEQ ID NO: 16544 - DNA, 20 bp, synthetic construct
  misc_feature 1..20: note = Description of Artificial Sequence: Synthetic oligonucleotide
  misc_feature 1..20: note = Target: ANGPTL3; (+) strand; PAM type: YTN; PAM sequence: TTC
  source 1..20: mol_type = other DNA
catttgtctagaatgtctcc

SEQ ID NO: 16545 - DNA, 20 bp, synthetic construct
  misc_feature 1..20: note = Description of Artificial Sequence: Synthetic oligonucleotide
  misc_feature 1..20: note = Target: ANGPTL3; (+) strand; PAM type: YTN; PAM sequence: TTT
  source 1..20: mol_type = other DNA
gtctagaatgtctccccaca

SEQ ID NO: 16546 - DNA, 20 bp, synthetic construct
  misc_feature 1..20: note = Description of Artificial Sequence: Synthetic oligonucleotide
  misc_feature 1..20: note = Target: ANGPTL3; (+) strand; PAM type: YTN; PAM sequence: TTG
  source 1..20: mol_type = other DNA
tctagaatgtctccccacac

SEQ ID NO: 16547 - DNA, 20 bp, synthetic construct
  misc_feature 1..20: note = Description of Artificial Sequence: Synthetic oligonucleotide
  misc_feature 1..20: note = Target: ANGPTL3; (+) strand; PAM type: YTN; PAM sequence: CTA
  source 1..20: mol_type = other DNA
gaatgtctccccacacattt

SEQ ID NO: 16548 - DNA, 20 bp, synthetic construct
  misc_feature 1..20: note = Description of Artificial Sequence: Synthetic oligonucleotide
  misc_feature 1..20: note = Target: ANGPTL3; (+) strand; PAM type: YTN; PAM sequence: CTC
  source 1..20: mol_type = other DNA
cccacacatttctgattggc

SEQ ID NO: 16549 - DNA, 20 bp, synthetic construct
  misc_feature 1..20: note = Description of Artificial Sequence: Synthetic oligonucleotide
  misc_feature 1..20: note = Target: ANGPTL3; (+) strand; PAM type: YTN; PAM sequence: TTT
  source 1..20: mol_type = other DNA
ctgattggctagattgtgcc

SEQ ID NO: 16550 - DNA, 20 bp, synthetic construct
  misc_feature 1..20: note = Description of Artificial Sequence: Synthetic oligonucleotide
  misc_feature 1..20: note = Target: ANGPTL3; (+) strand; PAM type: YTN; PAM sequence: TTC
  source 1..20: mol_type = other DNA
tgattggctagattgtgccg

SEQ ID NO: 16551 - DNA, 20 bp, synthetic construct
  misc_feature 1..20: note = Description of Artificial Sequence: Synthetic oligonucleotide
  misc_feature 1..20: note = Target: ANGPTL3; (+) strand; PAM type: YTN; PAM sequence: CTG
  source 1..20: mol_type = other DNA
attggctagattgtgccgta

SEQ ID NO: 16552 - DNA, 20 bp, synthetic construct
  misc_feature 1..20: note = Description of Artificial Sequence: Synthetic oligonucleotide
  misc_feature 1..20: note = Target: ANGPTL3; (+) strand; PAM type: YTN; PAM sequence: TTG
  source 1..20: mol_type = other DNA
gctagattgtgccgtatttt

SEQ ID NO: 16553 - DNA, 20 bp, synthetic construct
  misc_feature 1..20: note = Description of Artificial Sequence: Synthetic oligonucleotide
  misc_feature 1..20: note = Target: ANGPTL3; (+) strand; PAM type: YTN; PAM sequence: CTA
  source 1..20: mol_type = other DNA
gattgtgccgtattttaagg

SEQ ID NO: 16554 - DNA, 20 bp, synthetic construct
  misc_feature 1..20: note = Description of Artificial Sequence: Synthetic oligonucleotide
  misc_feature 1..20: note = Target: ANGPTL3; (+) strand; PAM type: YTN; PAM sequence: TTG
  source 1..20: mol_type = other DNA
tgccgtattttaaggtgcag

SEQ ID NO: 16555 - DNA, 20 bp, synthetic construct
  misc_feature 1..20: note = Description of Artificial Sequence: Synthetic oligonucleotide
  misc_feature 1..20: note = Target: ANGPTL3; (+) strand; PAM type: YTN; PAM sequence: TTT
  source 1..20: mol_type = other DNA
taaggtgcagatatctcaat

SEQ ID NO: 16556 - DNA, 20 bp, synthetic construct
  misc_feature 1..20: note = Description of Artificial Sequence: Synthetic oligonucleotide
  misc_feature 1..20: note = Target: ANGPTL3; (+) strand; PAM type: YTN; PAM sequence: TTT
  source 1..20: mol_type = other DNA
aaggtgcagatatctcaatt

SEQ ID NO: 16557 - DNA, 20 bp, synthetic construct
  misc_feature 1..20: note = Description of Artificial Sequence: Synthetic oligonucleotide
  misc_feature 1..20: note = Target: ANGPTL3; (+) strand; PAM type: YTN; PAM sequence: TTA
  source 1..20: mol_type = other DNA
aggtgcagatatctcaattc

SEQ ID NO: 16558 - DNA, 20 bp, synthetic construct
  misc_feature 1..20: note = Description of Artificial Sequence: Synthetic oligonucleotide
  misc_feature 1..20: note = Target: ANGPTL3; (+) strand; PAM type: YTN; PAM sequence: CTC
  source 1..20: mol_type = other DNA
aattcttccacaaatattct

SEQ ID NO: 16559 - DNA, 20 bp, synthetic construct
  misc_feature 1..20: note = Description of Artificial Sequence: Synthetic oligonucleotide
  misc_feature 1..20: note = Target: ANGPTL3; (+) strand; PAM type: YTN; PAM sequence: TTC
  source 1..20: mol_type = other DNA
ttccacaaatattctagtaa

SEQ ID NO: 16560 - DNA, 20 bp, synthetic construct
  misc_feature 1..20: note = Description of Artificial Sequence: Synthetic oligonucleotide
  misc_feature 1..20: note = Target: ANGPTL3; (+) strand; PAM type: YTN; PAM sequence: CTT
  source 1..20: mol_type = other DNA
ccacaaatattctagtaaat

SEQ ID NO: 16561 - DNA, 20 bp, synthetic construct
  misc_feature 1..20: note = Description of Artificial Sequence: Synthetic oligonucleotide
  misc_feature 1..20: note = Target: ANGPTL3; (+) strand; PAM type: YTN; PAM sequence: TTC
  source 1..20: mol_type = other DNA
cacaaatattctagtaaatg

SEQ ID NO: 16562 - DNA, 20 bp, synthetic construct
  misc_feature 1..20: note = Description of Artificial Sequence: Synthetic oligonucleotide
  misc_feature 1..20: note = Target: ANGPTL3; (+) strand; PAM type: YTN; PAM sequence: TTC
  source 1..20: mol_type = other DNA
tagtaaatggcagcttgttc

SEQ ID NO: 16563 - DNA, 20 bp, synthetic construct
  misc_feature 1..20: note = Description of Artificial Sequence: Synthetic oligonucleotide
  misc_feature 1..20: note = Target: ANGPTL3; (+) strand; PAM type: YTN; PAM sequence: CTA
  source 1..20: mol_type = other DNA
gtaaatggcagcttgttcat

SEQ ID NO: 16564 - DNA, 20 bp, synthetic construct
  misc_feature 1..20: note = Description of Artificial Sequence: Synthetic oligonucleotide
  misc_feature 1..20: note = Target: ANGPTL3; (+) strand; PAM type: YTN; PAM sequence: CTT
  source 1..20: mol_type = other DNA
gttcatctgaaaccacacag

SEQ ID NO: 16565 - DNA, 20 bp, synthetic construct
  misc_feature 1..20: note = Description of Artificial Sequence: Synthetic oligonucleotide
  misc_feature 1..20: note = Target: ANGPTL3; (+) strand; PAM type: YTN; PAM sequence: TTG
  source 1..20: mol_type = other DNA
ttcatctgaaaccacacaga

SEQ ID NO: 16566 - DNA, 20 bp, synthetic construct
  misc_feature 1..20: note = Description of Artificial Sequence: Synthetic oligonucleotide
  misc_feature 1..20: note = Target: ANGPTL3; (+) strand; PAM type: YTN; PAM sequence: TTC
  source 1..20: mol_type = other DNA
atctgaaaccacacagaatt

SEQ ID NO: 16567 - DNA, 20 bp, synthetic construct
  misc_feature 1..20: note = Description of Artificial Sequence: Synthetic oligonucleotide
  misc_feature 1..20: note = Target: ANGPTL3; (+) strand; PAM type: YTN; PAM sequence: CTG
  source 1..20: mol_type = other DNA
aaaccacacagaattactgt

SEQ ID NO: 16568 - DNA, 20 bp, synthetic construct
  misc_feature 1..20: note = Description of Artificial Sequence: Synthetic oligonucleotide
  misc_feature 1..20: note = Target: ANGPTL3; (+) strand; PAM type: YTN; PAM sequence: TTA
  source 1..20: mol_type = other DNA
ctgtccatacacctcaaatg

SEQ ID NO: 16569 - DNA, 20 bp, synthetic construct
  misc_feature 1..20: note = Description of Artificial Sequence: Synthetic oligonucleotide
  misc_feature 1..20: note = Target: ANGPTL3; (+) strand; PAM type: YTN; PAM sequence: CTG
  source 1..20: mol_type = other DNA
tccatacacctcaaatggca

SEQ ID NO: 16570 - DNA, 20 bp, synthetic construct
  misc_feature 1..20: note = Description of Artificial Sequence: Synthetic oligonucleotide
  misc_feature 1..20: note = Target: ANGPTL3; (+) strand; PAM type: YTN; PAM sequence: CTC
  source 1..20: mol_type = other DNA
aaatggcacttagtgagaaa

SEQ ID NO: 16571 - DNA, 20 bp, synthetic construct
  misc_feature 1..20: note = Description of Artificial Sequence: Synthetic oligonucleotide
  misc_feature 1..20: note = Target: ANGPTL3; (+) strand; PAM type: YTN; PAM sequence: CTT
  source 1..20: mol_type = other DNA
agtgagaaaatacacagaat

SEQ ID NO: 16572 - DNA, 20 bp, synthetic construct
  misc_feature 1..20: note = Description of Artificial Sequence: Synthetic oligonucleotide
  misc_feature 1..20: note = Target: ANGPTL3; (+) strand; PAM type: YTN; PAM sequence: TTA
  source 1..20: mol_type = other DNA
gtgagaaaatacacagaata

SEQ ID NO: 16573 - DNA, 20 bp, synthetic construct
  misc_feature 1..20: note = Description of Artificial Sequence: Synthetic oligonucleotide
  misc_feature 1..20: note = Target: ANGPTL3; (+) strand; PAM type: YTN; PAM sequence: TTC
  source 1..20: mol_type = other DNA
tgaaaaatagtactaaaagc

SEQ ID NO: 16574 - DNA, 20 bp, synthetic construct
  misc_feature 1..20: note = Description of Artificial Sequence: Synthetic oligonucleotide
  misc_feature 1..20: note = Target: ANGPTL3; (+) strand; PAM type: YTN; PAM sequence: CTG
  source 1..20: mol_type = other DNA
aaaaatagtactaaaagctc

SEQ ID NO: 16575 - DNA, 20 bp, synthetic construct
  misc_feature 1..20: note = Description of Artificial Sequence: Synthetic oligonucleotide
  misc_feature 1..20: note = Target: ANGPTL3; (+) strand; PAM type: YTN; PAM sequence: CTA
  source 1..20: mol_type = other DNA
aaagctccaaaagcatcaaa

SEQ ID NO: 16576 - DNA, 20 bp, synthetic construct
  misc_feature 1..20: note = Description of Artificial Sequence: Synthetic oligonucleotide
  misc_feature 1..20: note = Target: ANGPTL3; (+) strand; PAM type: YTN; PAM sequence: CTC
  source 1..20: mol_type = other DNA
caaaagcatcaaagatagtc

SEQ ID NO: 16577 - DNA, 20 bp, synthetic construct
  misc_feature 1..20: note = Description of Artificial Sequence: Synthetic oligonucleotide
  misc_feature 1..20: note = Target: ANGPTL3; (+) strand; PAM type: YTN; PAM sequence: TTT
  source 1..20: mol_type = other DNA
acctgattttagtgaattac

SEQ ID NO: 16578 - DNA, 20 bp, synthetic construct
  misc_feature 1..20: note = Description of Artificial Sequence: Synthetic oligonucleotide
  misc_feature 1..20: note = Target: ANGPTL3; (+) strand; PAM type: YTN; PAM sequence: TTA
  source 1..20: mol_type = other DNA
cctgattttagtgaattact

SEQ ID NO: 16579 - DNA, 20 bp, synthetic construct
  misc_feature 1..20: note = Description of Artificial Sequence: Synthetic oligonucleotide
  misc_feature 1..20: note = Target: ANGPTL3; (+) strand; PAM type: YTN; PAM sequence: CTG
  source 1..20: mol_type = other DNA
attttagtgaattactgaaa

SEQ ID NO: 16580 - DNA, 20 bp, synthetic construct
  misc_feature 1..20: note = Description of Artificial Sequence: Synthetic oligonucleotide
  misc_feature 1..20: note = Target: ANGPTL3; (+) strand; PAM type: YTN; PAM sequence: TTT
  source 1..20: mol_type = other DNA
tagtgaattactgaaaaatt

SEQ ID NO: 16581 - DNA, 20 bp, synthetic construct
  misc_feature 1..20: note = Description of Artificial Sequence: Synthetic oligonucleotide
  misc_feature 1..20: note = Target: ANGPTL3; (+) strand; PAM type: YTN; PAM sequence: TTT
  source 1..20: mol_type = other DNA
agtgaattactgaaaaattt

SEQ ID NO: 16582 - DNA, 20 bp, synthetic construct
  misc_feature 1..20: note = Description of Artificial Sequence: Synthetic oligonucleotide
  misc_feature 1..20: note = Target: ANGPTL3; (+) strand; PAM type: YTN; PAM sequence: TTA
  source 1..20: mol_type = other DNA
gtgaattactgaaaaatttc

SEQ ID NO: 16583 - DNA, 20 bp, synthetic construct
  misc_feature 1..20: note = Description of Artificial Sequence: Synthetic oligonucleotide
  misc_feature 1..20: note = Target: ANGPTL3; (+) strand; PAM type: YTN; PAM sequence: TTA
  source 1..20: mol_type = other DNA
ctgaaaaatttctatatcaa

SEQ ID NO: 16584 - DNA, 20 bp, synthetic construct
  misc_feature 1..20: note = Description of Artificial Sequence: Synthetic oligonucleotide
  misc_feature 1..20: note = Target: ANGPTL3; (+) strand; PAM type: YTN; PAM sequence: CTG
  source 1..20: mol_type = other DNA
aaaaatttctatatcaagag

SEQ ID NO: 16585 - DNA, 20 bp, synthetic construct
  misc_feature 1..20: note = Description of Artificial Sequence: Synthetic oligonucleotide
  misc_feature 1..20: note = Target: ANGPTL3; (+) strand; PAM type: YTN; PAM sequence: TTT
  source 1..20: mol_type = other DNA
ctatatcaagagtttatttt

SEQ ID NO: 16586 - DNA, 20 bp, synthetic construct
  misc_feature 1..20: note = Description of Artificial Sequence: Synthetic oligonucleotide
  misc_feature 1..20: note = Target: ANGPTL3; (+) strand; PAM type: YTN; PAM sequence: TTC
  source 1..20: mol_type = other DNA
tatatcaagagtttattttg

SEQ ID NO: 16587 - DNA, 20 bp, synthetic construct
  misc_feature 1..20: note = Description of Artificial Sequence: Synthetic oligonucleotide
  misc_feature 1..20: note = Target: ANGPTL3; (+) strand; PAM type: YTN; PAM sequence: CTA
  source 1..20: mol_type = other DNA
tatcaagagtttattttgaa

SEQ ID NO: 16588 - DNA, 20 bp, synthetic construct
  misc_feature 1..20: note = Description of Artificial Sequence: Synthetic oligonucleotide
  misc_feature 1..20: note = Target: ANGPTL3; (+) strand; PAM type: YTN; PAM sequence: TTT
  source 1..20: mol_type = other DNA
attttgaaccagtatgaatt

SEQ ID NO: 16589 - DNA, 20 bp, synthetic construct
  misc_feature 1..20: note = Description of Artificial Sequence: Synthetic oligonucleotide
  misc_feature 1..20: note = Target: ANGPTL3; (+) strand; PAM type: YTN; PAM sequence: TTA
  source 1..20: mol_type = other DNA
ttttgaaccagtatgaattt

SEQ ID NO: 16590 - DNA, 20 bp, synthetic construct
  misc_feature 1..20: note = Description of Artificial Sequence: Synthetic oligonucleotide
  misc_feature 1..20: note = Target: ANGPTL3; (+) strand; PAM type: YTN; PAM sequence: TTT
  source 1..20: mol_type = other DNA
tgaaccagtatgaattttac

SEQ ID NO: 16591 - DNA, 20 bp, synthetic construct
  misc_feature 1..20: note = Description of Artificial Sequence: Synthetic oligonucleotide
  misc_feature 1..20: note = Target: ANGPTL3; (+) strand; PAM type: YTN; PAM sequence: TTT
  source 1..20: mol_type = other DNA
gaaccagtatgaattttact

SEQ ID NO: 16592 - DNA, 20 bp, synthetic construct
  misc_feature 1..20: note = Description of Artificial Sequence: Synthetic oligonucleotide
  misc_feature 1..20: note = Target: ANGPTL3; (+) strand; PAM type: YTN; PAM sequence: TTG
  source 1..20: mol_type = other DNA
aaccagtatgaattttactg

SEQ ID NO: 16593 - DNA, 20 bp, synthetic construct
  misc_feature 1..20: note = Description of Artificial Sequence: Synthetic oligonucleotide
  misc_feature 1..20: note = Target: ANGPTL3; (+) strand; PAM type: YTN; PAM sequence: TTT
  source 1..20: mol_type = other DNA
tactgaaaccaagtacacac

SEQ ID NO: 16594 - DNA, 20 bp, synthetic construct
  misc_feature 1..20: note = Description of Artificial Sequence: Synthetic oligonucleotide
  misc_feature 1..20: note = Target: ANGPTL3; (+) strand; PAM type: YTN; PAM sequence: TTT
  source 1..20: mol_type = other DNA
actgaaaccaagtacacaca

SEQ ID NO: 16595 - DNA, 20 bp, synthetic construct
  misc_feature 1..20: note = Description of Artificial Sequence: Synthetic oligonucleotide
  misc_feature 1..20: note = Target: ANGPTL3; (+) strand; PAM type: YTN; PAM sequence: TTA
  source 1..20: mol_type = other DNA
ctgaaaccaagtacacacat

SEQ ID NO: 16596 - DNA, 20 bp, synthetic construct
  misc_feature 1..20: note = Description of Artificial Sequence: Synthetic oligonucleotide
  misc_feature 1..20: note = Target: ANGPTL3; (+) strand; PAM type: YTN; PAM sequence: CTG
  source 1..20: mol_type = other DNA
aaaccaagtacacacatgtc

SEQ ID NO: 16597 - DNA, 20 bp, synthetic construct
  misc_feature 1..20: note = Description of Artificial Sequence: Synthetic oligonucleotide
  misc_feature 1..20: note = Target: ANGPTL3; (+) strand; PAM type: YTN; PAM sequence: CTC
  source 1..20: mol_type = other DNA
attatgaggtaatctagtgt

SEQ ID NO: 16598 - DNA, 20 bp, synthetic construct
  misc_feature 1..20: note = Description of Artificial Sequence: Synthetic oligonucleotide
  misc_feature 1..20: note = Target: ANGPTL3; (+) strand; PAM type: YTN; PAM sequence: TTA
  source 1..20: mol_type = other DNA
tgaggtaatctagtgtagta

SEQ ID NO: 16599 - DNA, 20 bp, synthetic construct
  misc_feature 1..20: note = Description of Artificial Sequence: Synthetic oligonucleotide
  misc_feature 1..20: note = Target: ANGPTL3; (+) strand; PAM type: YTN; PAM sequence: CTA
  source 1..20: mol_type = other DNA
gtgtagtataatctatttcc

SEQ ID NO: 16600 - DNA, 20 bp, synthetic construct
  misc_feature 1..20: note = Description of Artificial Sequence: Synthetic oligonucleotide
  misc_feature 1..20: note = Target: ANGPTL3; (+) strand; PAM type: YTN; PAM sequence: CTA
  source 1..20: mol_type = other DNA
tttccatacactctgtcatc

SEQ ID NO: 16601 - DNA, 20 bp, synthetic construct
  misc_feature 1..20: note = Description of Artificial Sequence: Synthetic oligonucleotide
  misc_feature 1..20: note = Target: ANGPTL3; (+) strand; PAM type: YTN; PAM sequence: TTT
  source 1..20: mol_type = other DNA
ccatacactctgtcatcctg

SEQ ID NO: 16602 - DNA, 20 bp, synthetic construct
  misc_feature 1..20: note = Description of Artificial Sequence: Synthetic oligonucleotide
  misc_feature 1..20: note = Target: ANGPTL3; (+) strand; PAM type: YTN; PAM sequence: TTC
  source 1..20: mol_type = other DNA
catacactctgtcatcctgg

SEQ ID NO: 16603 - DNA, 20 bp, synthetic construct
  misc_feature 1..20: note = Description of Artificial Sequence: Synthetic oligonucleotide
  misc_feature 1..20: note = Target: ANGPTL3; (+) strand; PAM type: YTN; PAM sequence: CTC
  source 1..20: mol_type = other DNA
tgtcatcctggaatcagcat

SEQ ID NO: 16604 - DNA, 20 bp, synthetic construct
  misc_feature 1..20: note = Description of Artificial Sequence: Synthetic oligonucleotide
  misc_feature 1..20: note = Target: ANGPTL3; (+) strand; PAM type: YTN; PAM sequence: CTG
  source 1..20: mol_type = other DNA
tcatcctggaatcagcatat

SEQ ID NO: 16605 - DNA, 20 bp, synthetic construct
  misc_feature 1..20: note = Description of Artificial Sequence: Synthetic oligonucleotide
  misc_feature 1..20: note = Target: ANGPTL3; (+) strand; PAM type: YTN; PAM sequence: CTG
  source 1..20: mol_type = other DNA
gaatcagcatattttcatgc

SEQ ID NO: 16606 - DNA, 20 bp, synthetic construct
  misc_feature 1..20: note = Description of Artificial Sequence: Synthetic oligonucleotide
  misc_feature 1..20: note = Target: ANGPTL3; (+) strand; PAM type: YTN; PAM sequence: TTT
  source 1..20: mol_type = other DNA
tcatgcttgtatctttactt

SEQ ID NO: 16607 - DNA, 20 bp, synthetic construct
  misc_feature 1..20: note = Description of Artificial Sequence: Synthetic oligonucleotide
  misc_feature 1..20: note = Target: ANGPTL3; (+) strand; PAM type: YTN; PAM sequence: TTT
  source 1..20: mol_type = other DNA
catgcttgtatctttacttc

SEQ ID NO: 16608 - DNA, 20 bp, synthetic construct
  misc_feature 1..20: note = Description of Artificial Sequence: Synthetic oligonucleotide
  misc_feature 1..20: note = Target: ANGPTL3; (+) strand; PAM type: YTN; PAM sequence: TTC
  source 1..20: mol_type = other DNA
atgcttgtatctttacttcc

SEQ ID NO: 16609 - DNA, 20 bp, synthetic construct
  misc_feature 1..20: note = Description of Artificial Sequence: Synthetic oligonucleotide
  misc_feature 1..20: note = Target: ANGPTL3; (+) strand; PAM type: YTN; PAM sequence: CTT
  source 1..20: mol_type = other DNA
gtatctttacttcctaatag

SEQ ID NO: 16610 - DNA, 20 bp, synthetic construct
  misc_feature 1..20: note = Description of Artificial Sequence: Synthetic oligonucleotide
  misc_feature 1..20: note = Target: ANGPTL3; (+) strand; PAM type: YTN; PAM sequence: TTG
  source 1..20: mol_type = other DNA
tatctttacttcctaatagc

SEQ ID NO: 16611 - DNA, 20 bp, synthetic construct
  misc_feature 1..20: note = Description of Artificial Sequence: Synthetic oligonucleotide
  misc_feature 1..20: note = Target: ANGPTL3; (+) strand; PAM type: YTN; PAM sequence: CTT
  source 1..20: mol_type = other DNA
tacttcctaatagcataact

SEQ ID NO: 16612 - DNA, 20 bp, synthetic construct
  misc_feature 1..20: note = Description of Artificial Sequence: Synthetic oligonucleotide
  misc_feature 1..20: note = Target: ANGPTL3; (+) strand; PAM type: YTN; PAM sequence: TTT
  source 1..20: mol_type = other DNA
acttcctaatagcataactc

SEQ ID NO: 16613 - DNA, 20 bp, synthetic construct
  misc_feature 1..20: note = Description of Artificial Sequence: Synthetic oligonucleotide
  misc_feature 1..20: note = Target: ANGPTL3; (+) strand; PAM type: YTN; PAM sequence: TTA
  source 1..20: mol_type = other DNA
cttcctaatagcataactca

SEQ ID NO: 16614 - DNA, 20 bp, synthetic construct
  misc_feature 1..20: note = Description of Artificial Sequence: Synthetic oligonucleotide
  misc_feature 1..20: note = Target: ANGPTL3; (+) strand; PAM type: YTN; PAM sequence: CTT
  source 1..20: mol_type = other DNA
cctaatagcataactcatgg

SEQ ID NO: 16615 - DNA, 20 bp, synthetic construct
  misc_feature 1..20: note = Description of Artificial Sequence: Synthetic oligonucleotide
  misc_feature 1..20: note = Target: ANGPTL3; (+) strand; PAM type: YTN; PAM sequence: TTC
  source 1..20: mol_type = other DNA
ctaatagcataactcatgga

SEQ ID NO: 16616 - DNA, 20 bp, synthetic construct
  misc_feature 1..20: note = Description of Artificial Sequence: Synthetic oligonucleotide
  misc_feature 1..20: note = Target: ANGPTL3; (+) strand; PAM type: YTN; PAM sequence: CTA
  source 1..20: mol_type = other DNA
atagcataactcatggaagt

SEQ ID NO: 16617 - DNA, 20 bp, synthetic construct
  misc_feature 1..20: note = Description of Artificial Sequence: Synthetic oligonucleotide
  misc_feature 1..20: note = Target: ANGPTL3; (+) strand; PAM type: YTN; PAM sequence: CTC
  source 1..20: mol_type = other DNA
atggaagtcaactaactcat

SEQ ID NO: 16618 - DNA, 20 bp, synthetic construct
  misc_feature 1..20: note = Description of Artificial Sequence: Synthetic oligonucleotide
  misc_feature 1..20: note = Target: ANGPTL3; (+) strand; PAM type: YTN; PAM sequence: CTA
  source 1..20: mol_type = other DNA
actcattcattaattttaga

SEQ ID NO: 16619 - DNA, 20 bp, synthetic construct
  misc_feature 1..20: note = Description of Artificial Sequence: Synthetic oligonucleotide
  misc_feature 1..20: note = Target: ANGPTL3; (+) strand; PAM type: YTN; PAM sequence: CTC
  source 1..20: mol_type = other DNA
attcattaattttagaaatg

SEQ ID NO: 16620 - DNA, 20 bp, synthetic construct
  misc_feature 1..20: note = Description of Artificial Sequence: Synthetic oligonucleotide
  misc_feature 1..20: note = Target: ANGPTL3; (+) strand; PAM type: YTN; PAM sequence: TTC
  source 1..20: mol_type = other DNA
attaattttagaaatggtat

SEQ ID NO: 16621 - DNA, 20 bp, synthetic construct
  misc_feature 1..20: note = Description of Artificial Sequence: Synthetic oligonucleotide
  misc_feature 1..20: note = Target: ANGPTL3; (+) strand; PAM type: YTN; PAM sequence: TTA
  source 1..20: mol_type = other DNA
attttagaaatggtattcat

SEQ ID NO: 16622 - DNA, 20 bp, synthetic construct
  misc_feature 1..20: note = Description of Artificial Sequence: Synthetic oligonucleotide
  misc_feature 1..20: note = Target: ANGPTL3; (+) strand; PAM type: YTN; PAM sequence: TTT
  source 1..20: mol_type = other DNA
tagaaatggtattcattaaa

SEQ ID NO: 16623 - DNA, 20 bp, synthetic construct
  misc_feature 1..20: note = Description of Artificial Sequence: Synthetic oligonucleotide
  misc_feature 1..20: note = Target: ANGPTL3; (+) strand; PAM type: YTN; PAM sequence: TTT
  source 1..20: mol_type = other DNA
agaaatggtattcattaaac

SEQ ID NO: 16624 - DNA, 20 bp, synthetic construct
  misc_feature 1..20: note = Description of Artificial Sequence: Synthetic oligonucleotide
  misc_feature 1..20: note = Target: ANGPTL3; (+) strand; PAM type: YTN; PAM sequence: TTA
  source 1..20: mol_type = other DNA
gaaatggtattcattaaaca

SEQ ID NO: 16625 - DNA, 20 bp, synthetic construct
  misc_feature 1..20: note = Description of Artificial Sequence: Synthetic oligonucleotide
  misc_feature 1..20: note = Target: ANGPTL3; (+) strand; PAM type: YTN; PAM sequence: TTC
  source 1..20: mol_type = other DNA
attaaacaacacttattgag

SEQ ID NO: 16626 - DNA, 20 bp, synthetic construct
  misc_feature 1..20: note = Description of Artificial Sequence: Synthetic oligonucleotide
  misc_feature 1..20: note = Target: ANGPTL3; (+) strand; PAM type: YTN; PAM sequence: TTA
  source 1..20: mol_type = other DNA
aacaacacttattgagcatc

SEQ ID NO: 16627 - DNA, 20 bp, synthetic construct
  misc_feature 1..20: note = Description of Artificial Sequence: Synthetic oligonucleotide
  misc_feature 1..20: note = Target: ANGPTL3; (+) strand; PAM type: YTN; PAM sequence: CTT
  source 1..20: mol_type = other DNA
attgagcatctactatttgt

SEQ ID NO: 16628 - DNA, 20 bp, synthetic construct
  misc_feature 1..20: note = Description of Artificial Sequence: Synthetic oligonucleotide
  misc_feature 1..20: note = Target: ANGPTL3; (+) strand; PAM type: YTN; PAM sequence: TTA
  source 1..20: mol_type = other DNA
ttgagcatctactatttgtc

SEQ ID NO: 16629 - DNA, 20 bp, synthetic construct
  misc_feature 1..20: note = Description of Artificial Sequence: Synthetic oligonucleotide
  misc_feature 1..20: note = Target: ANGPTL3; (+) strand; PAM type: YTN; PAM sequence: TTG
  source 1..20: mol_type = other DNA
agcatctactatttgtctcc

SEQ ID NO: 16630 - DNA, 20 bp, synthetic construct
  misc_feature 1..20: note = Description of Artificial Sequence: Synthetic oligonucleotide
  misc_feature 1..20: note = Target: ANGPTL3; (+) strand; PAM type: YTN; PAM sequence: CTA
  source 1..20: mol_type = other DNA
ctatttgtctcctttaaaaa

SEQ ID NO: 16631 - DNA, 20 bp, synthetic construct
  misc_feature 1..20: note = Description of Artificial Sequence: Synthetic oligonucleotide
  misc_feature 1..20: note = Target: ANGPTL3; (+) strand; PAM type: YTN; PAM sequence: CTA
  source 1..20: mol_type = other DNA
tttgtctcctttaaaaaaca

SEQ ID NO: 16632 - DNA, 20 bp, synthetic construct
  misc_feature 1..20: note = Description of Artificial Sequence: Synthetic oligonucleotide
  misc_feature 1..20: note = Target: ANGPTL3; (+) strand; PAM type: YTN; PAM sequence: TTT
  source 1..20: mol_type = other DNA
gtctcctttaaaaaacatat

SEQ ID NO: 16633 - DNA, 20 bp, synthetic construct
  misc_feature 1..20: note = Description of Artificial Sequence: Synthetic oligonucleotide
  misc_feature 1..20: note = Target: ANGPTL3; (+) strand; PAM type: YTN; PAM sequence: TTG
  source 1..20: mol_type = other DNA
tctcctttaaaaaacatatt

SEQ ID NO: 16634 - DNA, 20 bp, synthetic construct
  misc_feature 1..20: note = Description of Artificial Sequence: Synthetic oligonucleotide
  misc_feature 1..20: note = Target: ANGPTL3; (+) strand; PAM type: YTN; PAM sequence: CTC
  source 1..20: mol_type = other DNA
ctttaaaaaacatattccaa

SEQ ID NO: 16635 - DNA, 20 bp, synthetic construct
  misc_feature 1..20: note = Description of Artificial Sequence: Synthetic oligonucleotide
  misc_feature 1..20: note = Target: ANGPTL3; (+) strand; PAM type: YTN; PAM sequence: CTT
  source 1..20: mol_type = other DNA
taaaaaacatattccaaatt

SEQ ID NO: 16636 - DNA, 20 bp, synthetic construct
  misc_feature 1..20: note = Description of Artificial Sequence: Synthetic oligonucleotide
  misc_feature 1..20: note = Target: ANGPTL3; (+) strand; PAM type: YTN; PAM sequence: TTT
  source 1..20: mol_type = other DNA
aaaaaacatattccaaattt

SEQ ID NO: 16637 - DNA, 20 bp, synthetic construct
  misc_feature 1..20: note = Description of Artificial Sequence: Synthetic oligonucleotide
  misc_feature 1..20: note = Target: ANGPTL3; (+) strand; PAM type: YTN; PAM sequence: TTA
  source 1..20: mol_type = other DNA
aaaaacatattccaaatttg

SEQ ID NO: 16638 - DNA, 20 bp, synthetic construct
  misc_feature 1..20: note = Description of Artificial Sequence: Synthetic oligonucleotide
  misc_feature 1..20: note = Target: ANGPTL3; (+) strand; PAM type: YTN; PAM sequence: TTC
  source 1..20: mol_type = other DNA
caaatttgtactcatatata

SEQ ID NO: 16639 - DNA, 20 bp, synthetic construct
  misc_feature 1..20: note = Description of Artificial Sequence: Synthetic oligonucleotide
  misc_feature 1..20: note = Target: ANGPTL3; (+) strand; PAM type: YTN; PAM sequence: TTT
  source 1..20: mol_type = other DNA
gtactcatatatactctacc

SEQ ID NO: 16640 - DNA, 20 bp, synthetic construct
  misc_feature 1..20: note = Description of Artificial Sequence: Synthetic oligonucleotide
  misc_feature 1..20: note = Target: ANGPTL3; (+) strand; PAM type: YTN; PAM sequence: TTG
  source 1..20: mol_type = other DNA
tactcatatatactctacct

SEQ ID NO: 16641 - DNA, 20 bp, synthetic construct
  misc_feature 1..20: note = Description of Artificial Sequence: Synthetic oligonucleotide
  misc_feature 1..20: note = Target: ANGPTL3; (+) strand; PAM type: YTN; PAM sequence: CTC
  source 1..20: mol_type = other DNA
atatatactctaccttctgc

SEQ ID NO: 16642 - DNA, 20 bp, synthetic construct
  misc_feature 1..20: note = Description of Artificial Sequence: Synthetic oligonucleotide
  misc_feature 1..20: note = Target: ANGPTL3; (+) strand; PAM type: YTN; PAM sequence: CTC
  source 1..20: mol_type = other DNA
taccttctgctgtaggataa

SEQ ID NO: 16643 - DNA, 20 bp, synthetic construct
  misc_feature 1..20: note = Description of Artificial Sequence: Synthetic oligonucleotide
  misc_feature 1..20: note = Target: ANGPTL3; (+) strand; PAM type: YTN; PAM sequence: CTA
  source 1..20: mol_type = other DNA
ccttctgctgtaggataatc

SEQ ID NO: 16644 - DNA, 20 bp, synthetic construct
  misc_feature 1..20: note = Description of Artificial Sequence: Synthetic oligonucleotide
  misc_feature 1..20: note = Target: ANGPTL3; (+) strand; PAM type: YTN; PAM sequence: CTT
  source 1..20: mol_type = other DNA
ctgctgtaggataatcaaat

SEQ ID NO: 16645 - DNA, 20 bp, synthetic construct
  misc_feature 1..20: note = Description of Artificial Sequence: Synthetic oligonucleotide
  misc_feature 1..20: note = Target: ANGPTL3; (+) strand; PAM type: YTN; PAM sequence: TTC
  source 1..20: mol_type = other DNA
tgctgtaggataatcaaatt

SEQ ID NO: 16646 - DNA, 20 bp, synthetic construct
  misc_feature 1..20: note = Description of Artificial Sequence: Synthetic oligonucleotide
  misc_feature 1..20: note = Target: ANGPTL3; (+) strand; PAM type: YTN; PAM sequence: CTG
  source 1..20: mol_type = other DNA
ctgtaggataatcaaatttc

SEQ ID NO: 16647 - DNA, 20 bp, synthetic construct
  misc_feature 1..20: note = Description of Artificial Sequence: Synthetic oligonucleotide
  misc_feature 1..20: note = Target: ANGPTL3; (+) strand; PAM type: YTN; PAM sequence: CTG
  source 1..20: mol_type = other DNA
taggataatcaaatttcctt

SEQ ID NO: 16648 - DNA, 20 bp, synthetic construct
  misc_feature 1..20: note = Description of Artificial Sequence: Synthetic oligonucleotide
  misc_feature 1..20: note = Target: ANGPTL3; (+) strand; PAM type: YTN; PAM sequence: TTT
  source 1..20: mol_type = other DNA
ccttgtgatttttttcccca

SEQ ID NO: 16649 - DNA, 20 bp, synthetic construct
  misc_feature 1..20: note = Description of Artificial Sequence: Synthetic oligonucleotide
  misc_feature 1..20: note = Target: ANGPTL3; (+) strand; PAM type: YTN; PAM sequence: TTC
  source 1..20: mol_type = other DNA
cttgtgatttttttccccat

SEQ ID NO: 16650 - DNA, 20 bp, synthetic construct
  misc_feature 1..20: note = Description of Artificial Sequence: Synthetic oligonucleotide
  misc_feature 1..20: note = Target: ANGPTL3; (+) strand; PAM type: YTN; PAM sequence: CTT
  source 1..20: mol_type = other DNA
gtgatttttttccccatcac

SEQ ID NO: 16651 - DNA, 20 bp, synthetic construct
  misc_feature 1..20: note = Description of Artificial Sequence: Synthetic oligonucleotide
  misc_feature 1..20: note = Target: ANGPTL3; (+) strand; PAM type: YTN; PAM sequence: TTG
  source 1..20: mol_type = other DNA
tgatttttttccccatcact

SEQ ID NO: 16652 - DNA, 20 bp, synthetic construct
  misc_feature 1..20: note = Description of Artificial Sequence: Synthetic oligonucleotide
  misc_feature 1..20: note = Target: ANGPTL3; (+) strand; PAM type: YTN; PAM sequence: TTT
  source 1..20: mol_type = other DNA
ttttccccatcactaacagc

SEQ ID NO: 16653 - DNA, 20 bp, synthetic construct
  misc_feature 1..20: note = Description of Artificial Sequence: Synthetic oligonucleotide
  misc_feature 1..20: note = Target: ANGPTL3; (+) strand; PAM type: YTN; PAM sequence: TTT
  source 1..20: mol_type = other DNA
tttccccatcactaacagcc

SEQ ID NO: 16654 - DNA, 20 bp, synthetic construct
  misc_feature 1..20: note = Description of Artificial Sequence: Synthetic oligonucleotide
  misc_feature 1..20: note = Target: ANGPTL3; (+) strand; PAM type: YTN; PAM sequence: TTT
  source 1..20: mol_type = other DNA
ttccccatcactaacagcca

SEQ ID NO: 16655 - DNA, 20 bp, synthetic construct
  misc_feature 1..20: note = Description of Artificial Sequence: Synthetic oligonucleotide
  misc_feature 1..20: note = Target: ANGPTL3; (+) strand; PAM type: YTN; PAM sequence: TTT
  source 1..20: mol_type = other DNA
tccccatcactaacagccat

SEQ ID NO: 16656 - DNA, 20 bp, synthetic construct
  misc_feature 1..20: note = Description of Artificial Sequence: Synthetic oligonucleotide
  misc_feature 1..20: note = Target: ANGPTL3; (+) strand; PAM type: YTN; PAM sequence: TTT
  source 1..20: mol_type = other DNA
ccccatcactaacagccata

SEQ ID NO: 16657 - DNA, 20 bp, synthetic construct
  misc_feature 1..20: note = Description of Artificial Sequence: Synthetic oligonucleotide
  misc_feature 1..20: note = Target: ANGPTL3; (+) strand; PAM type: YTN; PAM sequence: TTC
  source 1..20: mol_type = other DNA
cccatcactaacagccataa

SEQ ID NO: 16658 - DNA, 20 bp, synthetic construct
  misc_feature 1..20: note = Description of Artificial Sequence: Synthetic oligonucleotide
  misc_feature 1..20: note = Target: ANGPTL3; (+) strand; PAM type: YTN; PAM sequence: CTA
  source 1..20: mol_type = other DNA
acagccataaactctgcact

SEQ ID NO: 16659 - DNA, 20 bp, synthetic construct
  misc_feature 1..20: note = Description of Artificial Sequence: Synthetic oligonucleotide
  misc_feature 1..20: note = Target: ANGPTL3; (+) strand; PAM type: YTN; PAM sequence: CTC
  source 1..20: mol_type = other DNA
tgcacttatgtatgtactac

SEQ ID NO: 16660 - DNA, 20 bp, synthetic construct
  misc_feature 1..20: note = Description of Artificial Sequence: Synthetic oligonucleotide
  misc_feature 1..20: note = Target: ANGPTL3; (+) strand; PAM type: YTN; PAM sequence: CTG
  source 1..20: mol_type = other DNA
cacttatgtatgtactactg

SEQ ID NO: 16661 - DNA, 20 bp, synthetic construct
  misc_feature 1..20: note = Description of Artificial Sequence: Synthetic oligonucleotide
  misc_feature 1..20: note = Target: ANGPTL3; (+) strand; PAM type: YTN; PAM sequence: CTT
  source 1..20: mol_type = other DNA
atgtatgtactactgagtga

SEQ ID NO: 16662 - DNA, 20 bp, synthetic construct
  misc_feature 1..20: note = Description of Artificial Sequence: Synthetic oligonucleotide
  misc_feature 1..20: note = Target: ANGPTL3; (+) strand; PAM type: YTN; PAM sequence: TTA
  source 1..20: mol_type = other DNA
tgtatgtactactgagtgat

SEQ ID NO: 16663 - DNA, 20 bp, synthetic construct
  misc_feature 1..20: note = Description of Artificial Sequence: Synthetic oligonucleotide
  misc_feature 1..20: note = Target: ANGPTL3; (+) strand; PAM type: YTN; PAM sequence: CTA
  source 1..20: mol_type = other DNA
ctgagtgattatcaaacaca

SEQ ID NO: 16664 - DNA, 20 bp, synthetic construct
  misc_feature 1..20: note = Description of Artificial Sequence: Synthetic oligonucleotide
  misc_feature 1..20: note = Target: ANGPTL3; (+) strand; PAM type: YTN; PAM sequence: CTG
  source 1..20: mol_type = other DNA
agtgattatcaaacacagca

SEQ ID NO: 16665 - DNA, 20 bp, synthetic construct
  misc_feature 1..20: note = Description of Artificial Sequence: Synthetic oligonucleotide
  misc_feature 1..20: note = Target: ANGPTL3; (+) strand; PAM type: YTN; PAM sequence: TTA
  source 1..20: mol_type = other DNA
tcaaacacagcagttttaaa

SEQ ID NO: 16666 - DNA, 20 bp, synthetic construct
  misc_feature 1..20: note = Description of Artificial Sequence: Synthetic oligonucleotide
  misc_feature 1..20: note = Target: ANGPTL3; (+) strand; PAM type: YTN; PAM sequence: TTT
  source 1..20: mol_type = other DNA
taaaaatgaaaagaaagtga

SEQ ID NO: 16667 - DNA, 20 bp, synthetic construct
  misc_feature 1..20: note = Description of Artificial Sequence: Synthetic oligonucleotide
  misc_feature 1..20: note = Target: ANGPTL3; (+) strand; PAM type: YTN; PAM sequence: TTT
  source 1..20: mol_type = other DNA
aaaaatgaaaagaaagtgac

SEQ ID NO: 16668 - DNA, 20 bp, synthetic construct
  misc_feature 1..20: note = Description of Artificial Sequence: Synthetic oligonucleotide
  misc_feature 1..20: note = Target: ANGPTL3; (+) strand; PAM type: YTN; PAM sequence: TTA
  source 1..20: mol_type = other DNA
aaaatgaaaagaaagtgacc

SEQ ID NO: 16669 - DNA, 20 bp, synthetic construct
  misc_feature 1..20: note = Description of Artificial Sequence: Synthetic oligonucleotide
  misc_feature 1..20: note = Target: ANGPTL3; (+) strand; PAM type: YTN; PAM sequence: TTG
  source 1..20: mol_type = other DNA
gcccttttatcaaagtccaa

SEQ ID NO: 16670 - DNA, 20 bp, synthetic construct
  misc_feature 1..20: note = Description of Artificial Sequence: Synthetic oligonucleotide
  misc_feature 1..20: note = Target: ANGPTL3; (+) strand; PAM type: YTN; PAM sequence: CTT
  source 1..20: mol_type = other DNA
ttatcaaagtccaaagtatt

SEQ ID NO: 16671 - DNA, 20 bp, synthetic construct
  misc_feature 1..20: note = Description of Artificial Sequence: Synthetic oligonucleotide
  misc_feature 1..20: note = Target: ANGPTL3; (+) strand; PAM type: YTN; PAM sequence: TTT
  source 1..20: mol_type = other DNA
tatcaaagtccaaagtatta

SEQ ID NO: 16672 - DNA, 20 bp, synthetic construct
  misc_feature 1..20: note = Description of Artificial Sequence: Synthetic oligonucleotide
  misc_feature 1..20: note = Target: ANGPTL3; (+) strand; PAM type: YTN; PAM sequence: TTT
  source 1..20: mol_type = other DNA
atcaaagtccaaagtattat

SEQ ID NO: 16673 - DNA, 20 bp, synthetic construct
  misc_feature 1..20: note = Description of Artificial Sequence: Synthetic oligonucleotide
  misc_feature 1..20: note = Target: ANGPTL3; (+) strand; PAM type: YTN; PAM sequence: TTA
  source 1..20: mol_type = other DNA
tcaaagtccaaagtattatc

SEQ ID NO: 16674 - DNA, 20 bp, synthetic construct
  misc_feature 1..20: note = Description of Artificial Sequence: Synthetic oligonucleotide
  misc_feature 1..20: note = Target: ANGPTL3; (+) strand; PAM type: YTN; PAM sequence: TTA
  source 1..20: mol_type = other DNA
tcatggcaaatcaactaggg

SEQ ID NO: 16675 - DNA, 20 bp, synthetic construct
  misc_feature 1..20: note = Description of Artificial Sequence: Synthetic oligonucleotide
  misc_feature 1..20: note = Target: ANGPTL3; (+) strand; PAM type: YTN; PAM sequence: CTA
  source 1..20: mol_type = other DNA
gggtaaaattacttaactgg

SEQ ID NO: 16676 - DNA, 20 bp, synthetic construct
  misc_feature 1..20: note = Description of Artificial Sequence: Synthetic oligonucleotide
  misc_feature 1..20: note = Target: ANGPTL3; (+) strand; PAM type: YTN; PAM sequence: TTA
  source 1..20: mol_type = other DNA
cttaactggtgcacagttca

SEQ ID NO: 16677 - DNA, 20 bp, synthetic construct
  misc_feature 1..20: note = Description of Artificial Sequence: Synthetic oligonucleotide
  misc_feature 1..20: note = Target: ANGPTL3; (+) strand; PAM type: YTN; PAM sequence: CTT
  source 1..20: mol_type = other DNA
aactggtgcacagttcaagg

SEQ ID NO: 16678 - DNA, 20 bp, synthetic construct
  misc_feature 1..20: note = Description of Artificial Sequence: Synthetic oligonucleotide
  misc_feature 1..20: note = Target: ANGPTL3; (+) strand; PAM type: YTN; PAM sequence: TTA
  source 1..20: mol_type = other DNA
actggtgcacagttcaaggt

SEQ ID NO: 16679 - DNA, 20 bp, synthetic construct
  misc_feature 1..20: note = Description of Artificial Sequence: Synthetic oligonucleotide
  misc_feature 1..20: note = Target: ANGPTL3; (+) strand; PAM type: YTN; PAM sequence: CTG
  source 1..20: mol_type = other DNA
gtgcacagttcaaggtcatg

SEQ ID NO: 16680 - DNA, 20 bp, synthetic construct
  misc_feature 1..20: note = Description of Artificial Sequence: Synthetic oligonucleotide
  misc_feature 1..20: note = Target: ANGPTL3; (+) strand; PAM type: YTN; PAM sequence: TTC
  source 1..20: mol_type = other DNA
aaggtcatgaaagtagcact

SEQ ID NO: 16681 - DNA, 20 bp, synthetic construct
  misc_feature 1..20: note = Description of Artificial Sequence: Synthetic oligonucleotide
  misc_feature 1..20: note = Target: ANGPTL3; (+) strand; PAM type: YTN; PAM sequence: CTA
  source 1..20: mol_type = other DNA
acaatcctctattataaccc

SEQ ID NO: 16682 - DNA, 20 bp, synthetic construct
  misc_feature 1..20: note = Description of Artificial Sequence: Synthetic oligonucleotide
  misc_feature 1..20: note = Target: ANGPTL3; (+) strand; PAM type: YTN; PAM sequence: CTC
  source 1..20: mol_type = other DNA
tattataacccttaataaaa

SEQ ID NO: 16683 - DNA, 20 bp, synthetic construct
  misc_feature 1..20: note = Description of Artificial Sequence: Synthetic oligonucleotide
  misc_feature 1..20: note = Target: ANGPTL3; (+) strand; PAM type: YTN; PAM sequence: CTA
  source 1..20: mol_type = other DNA
ttataacccttaataaaatg

SEQ ID NO: 16684 - DNA, 20 bp, synthetic construct
  misc_feature 1..20: note = Description of Artificial Sequence: Synthetic oligonucleotide
  misc_feature 1..20: note = Target: ANGPTL3; (+) strand; PAM type: YTN; PAM sequence: TTA
  source 1..20: mol_type = other DNA
taacccttaataaaatgagg

SEQ ID NO: 16685 - DNA, 20 bp, synthetic construct
  misc_feature 1..20: note = Description of Artificial Sequence: Synthetic oligonucleotide
  misc_feature 1..20: note = Target: ANGPTL3; (+) strand; PAM type: YTN; PAM sequence: CTT
  source 1..20: mol_type = other DNA
aataaaatgaggttttaatg

SEQ ID NO: 16686 - DNA, 20 bp, synthetic construct
  misc_feature 1..20: note = Description of Artificial Sequence: Synthetic oligonucleotide
  misc_feature 1..20: note = Target: ANGPTL3; (+) strand; PAM type: YTN; PAM sequence: TTA
  source 1..20: mol_type = other DNA
ataaaatgaggttttaatga

SEQ ID NO: 16687 - DNA, 20 bp, synthetic construct
  misc_feature 1..20: note = Description of Artificial Sequence: Synthetic oligonucleotide
  misc_feature 1..20: note = Target: ANGPTL3; (+) strand; PAM type: YTN; PAM sequence: TTT
  source 1..20: mol_type = other DNA
taatgacattttaggaaata

SEQ ID NO: 16688 - DNA, 20 bp, synthetic construct
  misc_feature 1..20: note = Description of Artificial Sequence: Synthetic oligonucleotide
  misc_feature 1..20: note = Target: ANGPTL3; (+) strand; PAM type: YTN; PAM sequence: TTT
  source 1..20: mol_type = other DNA
aatgacattttaggaaatat

SEQ ID NO: 16689 - DNA, 20 bp, synthetic construct
  misc_feature 1..20: note = Description of Artificial Sequence: Synthetic oligonucleotide
  misc_feature 1..20: note = Target: ANGPTL3; (+) strand; PAM type: YTN; PAM sequence: TTA
  source 1..20: mol_type = other DNA
atgacattttaggaaatata

SEQ ID NO: 16690 - DNA, 20 bp, synthetic construct
  misc_feature 1..20: note = Description of Artificial Sequence: Synthetic oligonucleotide
  misc_feature 1..20: note = Target: ANGPTL3; (+) strand; PAM type: YTN; PAM sequence: TTT
  source 1..20: mol_type = other DNA
taggaaatataaaataaact

SEQ ID NO: 16691 - DNA, 20 bp, synthetic construct
  misc_feature 1..20: note = Description of Artificial Sequence: Synthetic oligonucleotide
  misc_feature 1..20: note = Target: ANGPTL3; (+) strand; PAM type: YTN; PAM sequence: TTT
  source 1..20: mol_type = other DNA
aggaaatataaaataaactt

SEQ ID NO: 16692 - DNA, 20 bp, synthetic construct
  misc_feature 1..20: note = Description of Artificial Sequence: Synthetic oligonucleotide
  misc_feature 1..20: note = Target: ANGPTL3; (+) strand; PAM type: YTN; PAM sequence: TTA
  source 1..20: mol_type = other DNA
ggaaatataaaataaactta

SEQ ID NO: 16693 - DNA, 20 bp, synthetic construct
  misc_feature 1..20: note = Description of Artificial Sequence: Synthetic oligonucleotide
  misc_feature 1..20: note = Target: ANGPTL3; (+) strand; PAM type: YTN; PAM sequence: CTT
  source 1..20: mol_type = other DNA
aagaattctatctaaaatac

SEQ ID NO: 16694 - DNA, 20 bp, synthetic construct
  misc_feature 1..20: note = Description of Artificial Sequence: Synthetic oligonucleotide
  misc_feature 1..20: note = Target: ANGPTL3; (+) strand; PAM type: YTN; PAM sequence: TTA
  source 1..20: mol_type = other DNA
agaattctatctaaaataca

SEQ ID NO: 16695 - DNA, 20 bp, synthetic construct
  misc_feature 1..20: note = Description of Artificial Sequence: Synthetic oligonucleotide
  misc_feature 1..20: note = Target: ANGPTL3; (+) strand; PAM type: YTN; PAM sequence: TTC
  source 1..20: mol_type = other DNA
tatctaaaatacaaaggctg

SEQ ID NO: 16696 - DNA, 20 bp, synthetic construct
  misc_feature 1..20: note = Description of Artificial Sequence: Synthetic oligonucleotide
  misc_feature 1..20: note = Target: ANGPTL3; (+) strand; PAM type: YTN; PAM sequence: CTA
  source 1..20: mol_type = other DNA
tctaaaatacaaaggctgtt

SEQ ID NO: 16697 - DNA, 20 bp, synthetic construct
  misc_feature 1..20: note = Description of Artificial Sequence: Synthetic oligonucleotide
  misc_feature 1..20: note = Target: ANGPTL3; (+) strand; PAM type: YTN; PAM sequence: CTA
  source 1..20: mol_type = other DNA
aaatacaaaggctgtttttc

SEQ ID NO: 16698 - DNA, 20 bp, synthetic construct
  misc_feature 1..20: note = Description of Artificial Sequence: Synthetic oligonucleotide
  misc_feature 1..20: note = Target: ANGPTL3; (+) strand; PAM type: YTN; PAM sequence: CTG
  source 1..20: mol_type = other DNA
tttttcctaaattcatgttt

SEQ ID NO: 16699 - DNA, 20 bp, synthetic construct
  misc_feature 1..20: note = Description of Artificial Sequence: Synthetic oligonucleotide
  misc_feature 1..20: note = Target: ANGPTL3; (+) strand; PAM type: YTN; PAM sequence: TTT
  source 1..20: mol_type = other DNA
ttcctaaattcatgtttagt

SEQ ID NO: 16700 - DNA, 20 bp, synthetic construct
  misc_feature 1..20: note = Description of Artificial Sequence: Synthetic oligonucleotide
  misc_feature 1..20: note = Target: ANGPTL3; (+) strand; PAM type: YTN; PAM sequence: TTT
  source 1..20: mol_type = other DNA
tcctaaattcatgtttagtc

SEQ ID NO: 16701 - DNA, 20 bp, synthetic construct
  misc_feature 1..20: note = Description of Artificial Sequence: Synthetic oligonucleotide
  misc_feature 1..20: note = Target: ANGPTL3; (+) strand; PAM type: YTN; PAM sequence: TTT
  source 1..20: mol_type = other DNA
cctaaattcatgtttagtcc

SEQ ID NO: 16702 - DNA, 20 bp, synthetic construct
  misc_feature 1..20: note = Description of Artificial Sequence: Synthetic oligonucleotide
  misc_feature 1..20: note = Target: ANGPTL3; (+) strand; PAM type: YTN; PAM sequence: TTC
  source 1..20: mol_type = other DNA
ctaaattcatgtttagtcct

SEQ ID NO: 16703 - DNA, 20 bp, synthetic construct
  misc_feature 1..20: note = Description of Artificial Sequence: Synthetic oligonucleotide
  misc_feature 1..20: note = Target: ANGPTL3; (+) strand; PAM type: YTN; PAM sequence: CTA
  source 1..20: mol_type = other DNA
aattcatgtttagtcctaag

SEQ ID NO: 16704 - DNA, 20 bp, synthetic construct
  misc_feature 1..20: note = Description of Artificial Sequence: Synthetic oligonucleotide
  misc_feature 1..20: note = Target: ANGPTL3; (+) strand; PAM type: YTN; PAM sequence: TTC
  source 1..20: mol_type = other DNA
atgtttagtcctaagaacag

SEQ ID NO: 16705 - DNA, 20 bp, synthetic construct
  misc_feature 1..20: note = Description of Artificial Sequence: Synthetic oligonucleotide
  misc_feature 1..20: note = Target: ANGPTL3; (+) strand; PAM type: YTN; PAM sequence: TTT
  source 1..20: mol_type = other DNA
agtcctaagaacagtcatac

SEQ ID NO: 16706 - DNA, 20 bp, synthetic construct
  misc_feature 1..20: note = Description of Artificial Sequence: Synthetic oligonucleotide
  misc_feature 1..20: note = Target: ANGPTL3; (+) strand; PAM type: YTN; PAM sequence: TTA
  source 1..20: mol_type = other DNA
gtcctaagaacagtcataca

SEQ ID NO: 16707 - DNA, 20 bp, synthetic construct
  misc_feature 1..20: note = Description of Artificial Sequence: Synthetic oligonucleotide
  misc_feature 1..20: note = Target: ANGPTL3; (+) strand; PAM type: YTN; PAM sequence: CTA
  source 1..20: mol_type = other DNA
agaacagtcatacatctaat

SEQ ID NO: 16708 - DNA, 20 bp, synthetic construct
  misc_feature 1..20: note = Description of Artificial Sequence: Synthetic oligonucleotide
  misc_feature 1..20: note = Target: ANGPTL3; (+) strand; PAM type: YTN; PAM sequence: CTA
  source 1..20: mol_type = other DNA
ataaaatgactgggtatata

SEQ ID NO: 16709 - DNA, 20 bp, synthetic construct
  misc_feature 1..20: note = Description of Artificial Sequence: Synthetic oligonucleotide
  misc_feature 1..20: note = Target: ANGPTL3; (+) strand; PAM type: YTN; PAM sequence: CTG
  source 1..20: mol_type = other DNA
ggtatataatttgaaagagc

SEQ ID NO: 16710 - DNA, 20 bp, synthetic construct
  misc_feature 1..20: note = Description of Artificial Sequence: Synthetic oligonucleotide
  misc_feature 1..20: note = Target: ANGPTL3; (+) strand; PAM type: YTN; PAM sequence: TTT
  source 1..20: mol_type = other DNA
gaaagagcaataaattacta

SEQ ID NO: 16711 - DNA, 20 bp, synthetic construct
  misc_feature 1..20: note = Description of Artificial Sequence: Synthetic oligonucleotide
  misc_feature 1..20: note = Target: ANGPTL3; (+) strand; PAM type: YTN; PAM sequence: TTG
  source 1..20: mol_type = other DNA
aaagagcaataaattactac

SEQ ID NO: 16712 - DNA, 20 bp, synthetic construct
  misc_feature 1..20: note = Description of Artificial Sequence: Synthetic oligonucleotide
  misc_feature 1..20: note = Target: ANGPTL3; (+) strand; PAM type: YTN; PAM sequence: TTA
  source 1..20: mol_type = other DNA
ctaccttgaagatgtaaggt

SEQ ID NO: 16713 - DNA, 20 bp, synthetic construct
  misc_feature 1..20: note = Description of Artificial Sequence: Synthetic oligonucleotide
  misc_feature 1..20: note = Target: ANGPTL3; (+) strand; PAM type: YTN; PAM sequence: CTA
  source 1..20: mol_type = other DNA
ccttgaagatgtaaggttgt

SEQ ID NO: 16714 - DNA, 20 bp, synthetic construct
  misc_feature 1..20: note = Description of Artificial Sequence: Synthetic oligonucleotide
  misc_feature 1..20: note = Target: ANGPTL3; (+) strand; PAM type: YTN; PAM sequence: CTT
  source 1..20: mol_type = other DNA
gaagatgtaaggttgtagct

SEQ ID NO: 16715 - DNA, 20 bp, synthetic construct
  misc_feature 1..20: note = Description of Artificial Sequence: Synthetic oligonucleotide
  misc_feature 1..20: note = Target: ANGPTL3; (+) strand; PAM type: YTN; PAM sequence: TTG
  source 1..20: mol_type = other DNA
aagatgtaaggttgtagcta

SEQ ID NO: 16716 - DNA, 20 bp, synthetic construct
  misc_feature 1..20: note = Description of Artificial Sequence: Synthetic oligonucleotide
  misc_feature 1..20: note = Target: ANGPTL3; (+) strand; PAM type: YTN; PAM sequence: TTG
  source 1..20: mol_type = other DNA
tagctatttatcttaaaata

SEQ ID NO: 16717 - DNA, 20 bp, synthetic construct
  misc_feature 1..20: note = Description of Artificial Sequence: Synthetic oligonucleotide
  misc_feature 1..20: note = Target: ANGPTL3; (+) strand; PAM type: YTN; PAM sequence: CTA
  source 1..20: mol_type = other DNA
tttatcttaaaatacacagt

SEQ ID NO: 16718 - DNA, 20 bp, synthetic construct
  misc_feature 1..20: note = Description of Artificial Sequence: Synthetic oligonucleotide
  misc_feature 1..20: note = Target: ANGPTL3; (+) strand; PAM type: YTN; PAM sequence: TTT
  source 1..20: mol_type = other DNA
atcttaaaatacacagtcaa

SEQ ID NO: 16719 - DNA, 20 bp, synthetic construct
  misc_feature 1..20: note = Description of Artificial Sequence: Synthetic oligonucleotide
  misc_feature 1..20: note = Target: ANGPTL3; (+) strand; PAM type: YTN; PAM sequence: TTA
  source 1..20: mol_type = other DNA
tcttaaaatacacagtcaaa

SEQ ID NO: 16720 - DNA, 20 bp, synthetic construct
  misc_feature 1..20: note = Description of Artificial Sequence: Synthetic oligonucleotide
  misc_feature 1..20: note = Target: ANGPTL3; (+) strand; PAM type: YTN; PAM sequence: CTT
  source 1..20: mol_type = other DNA
aaaatacacagtcaaacctc

SEQ ID NO: 16721 - DNA, 20 bp, synthetic construct
  misc_feature 1..20: note = Description of Artificial Sequence: Synthetic oligonucleotide
  misc_feature 1..20: note = Target: ANGPTL3; (+) strand; PAM type: YTN; PAM sequence: TTA
  source 1..20: mol_type = other DNA
aaatacacagtcaaacctca

SEQ ID NO: 16722 - DNA, 20 bp, synthetic construct
  misc_feature 1..20: note = Description of Artificial Sequence: Synthetic oligonucleotide
  misc_feature 1..20: note = Target: ANGPTL3; (+) strand; PAM type: YTN; PAM sequence: CTC
  source 1..20: mol_type = other DNA
agtttccacacccaatagat

SEQ ID NO: 16723 - DNA, 20 bp, synthetic construct
  misc_feature 1..20: note = Description of Artificial Sequence: Synthetic oligonucleotide
  misc_feature 1..20: note = Target: ANGPTL3; (+) strand; PAM type: YTN; PAM sequence: TTT
  source 1..20: mol_type = other DNA
ccacacccaatagatgggaa

SEQ ID NO: 16724 - DNA, 20 bp, synthetic construct
  misc_feature 1..20: note = Description of Artificial Sequence: Synthetic oligonucleotide
  misc_feature 1..20: note = Target: ANGPTL3; (+) strand; PAM type: YTN; PAM sequence: TTC
  source 1..20: mol_type = other DNA
cacacccaatagatgggaat

SEQ ID NO: 16725 - DNA, 20 bp, synthetic construct
  misc_feature 1..20: note = Description of Artificial Sequence: Synthetic oligonucleotide
  misc_feature 1..20: note = Target: ANGPTL3; (+) strand; PAM type: YTN; PAM sequence: CTG
  source 1..20: mol_type = other DNA
tcaaatctattaatacttca

SEQ ID NO: 16726 - DNA, 20 bp, synthetic construct
  misc_feature 1..20: note = Description of Artificial Sequence: Synthetic oligonucleotide
  misc_feature 1..20: note = Target: ANGPTL3; (+) strand; PAM type: YTN; PAM sequence: CTA
  source 1..20: mol_type = other DNA
ttaatacttcatgggattgt

SEQ ID NO: 16727 - DNA, 20 bp, synthetic construct
  misc_feature 1..20: note = Description of Artificial Sequence: Synthetic oligonucleotide
  misc_feature 1..20: note = Target: ANGPTL3; (+) strand; PAM type: YTN; PAM sequence: TTA
  source 1..20: mol_type = other DNA
atacttcatgggattgtaat

SEQ ID NO: 16728 - DNA, 20 bp, synthetic construct
  misc_feature 1..20: note = Description of Artificial Sequence: Synthetic oligonucleotide
  misc_feature 1..20: note = Target: ANGPTL3; (+) strand; PAM type: YTN; PAM sequence: CTT
  source 1..20: mol_type = other DNA
catgggattgtaatcatcaa

SEQ ID NO: 16729 - DNA, 20 bp, synthetic construct
  misc_feature 1..20: note = Description of Artificial Sequence: Synthetic oligonucleotide
  misc_feature 1..20: note = Target: ANGPTL3; (+) strand; PAM type: YTN; PAM sequence: TTC
  source 1..20: mol_type = other DNA
atgggattgtaatcatcaag

SEQ ID NO: 16730 - DNA, 20 bp, synthetic construct
  misc_feature 1..20: note = Description of Artificial Sequence: Synthetic oligonucleotide
  misc_feature 1..20: note = Target: ANGPTL3; (+) strand; PAM type: YTN; PAM sequence: TTG
  source 1..20: mol_type = other DNA
taatcatcaagccagataat

SEQ ID NO: 16731 - DNA, 20 bp, synthetic construct
  misc_feature 1..20: note = Description of Artificial Sequence: Synthetic oligonucleotide
  misc_feature 1..20: note = Target: ANGPTL3; (+) strand; PAM type: YTN; PAM sequence: TTT
  source 1..20: mol_type = other DNA
gaatagctttatgaactata

SEQ ID NO: 16732 - DNA, 20 bp, synthetic construct
  misc_feature 1..20: note = Description of Artificial Sequence: Synthetic oligonucleotide
  misc_feature 1..20: note = Target: ANGPTL3; (+) strand; PAM type: YTN; PAM sequence: TTG
  source 1..20: mol_type = other DNA
aatagctttatgaactataa

SEQ ID NO: 16733 - DNA, 20 bp, synthetic construct
  misc_feature 1..20: note = Description of Artificial Sequence: Synthetic oligonucleotide
  misc_feature 1..20: note = Target: ANGPTL3; (+) strand; PAM type: YTN; PAM sequence: CTT
  source 1..20: mol_type = other DNA
tatgaactataaagttctaa

SEQ ID NO: 16734 - DNA, 20 bp, synthetic construct
  misc_feature 1..20: note = Description of Artificial Sequence: Synthetic oligonucleotide
  misc_feature 1..20: note = Target: ANGPTL3; (+) strand; PAM type: YTN; PAM sequence: TTT
  source 1..20: mol_type = other DNA
atgaactataaagttctaaa

SEQ ID NO: 16735 - DNA, 20 bp, synthetic construct
  misc_feature 1..20: note = Description of Artificial Sequence: Synthetic oligonucleotide
  misc_feature 1..20: note = Target: ANGPTL3; (+) strand; PAM type: YTN; PAM sequence: TTA
  source 1..20: mol_type = other DNA
tgaactataaagttctaaac

SEQ ID NO: 16736 - DNA, 20 bp, synthetic construct
  misc_feature 1..20: note = Description of Artificial Sequence: Synthetic oligonucleotide
  misc_feature 1..20: note = Target: ANGPTL3; (+) strand; PAM type: YTN; PAM sequence: CTA
  source 1..20: mol_type = other DNA
taaagttctaaacaaatgta

SEQ ID NO: 16737 - DNA, 20 bp, synthetic construct
  misc_feature 1..20: note = Description of Artificial Sequence: Synthetic oligonucleotide
  misc_feature 1..20: note = Target: ANGPTL3; (+) strand; PAM type: YTN; PAM sequence: TTC
  source 1..20: mol_type = other DNA
taaacaaatgtatatacttt

SEQ ID NO: 16738 - DNA, 20 bp, synthetic construct
  misc_feature 1..20: note = Description of Artificial Sequence: Synthetic oligonucleotide
  misc_feature 1..20: note = Target: ANGPTL3; (+) strand; PAM type: YTN; PAM sequence: CTA
  source 1..20: mol_type = other DNA
aacaaatgtatatacttttt

SEQ ID NO: 16739 - DNA, 20 bp, synthetic construct
  misc_feature 1..20: note = Description of Artificial Sequence: Synthetic oligonucleotide
  misc_feature 1..20: note = Target: ANGPTL3; (+) strand; PAM type: YTN; PAM sequence: CTT
  source 1..20: mol_type = other DNA
tttaaaaacaggttcttccg

SEQ ID NO: 16740 - DNA, 20 bp, synthetic construct
  misc_feature 1..20: note = Description of Artificial Sequence: Synthetic oligonucleotide
  misc_feature 1..20: note = Target: ANGPTL3; (+) strand; PAM type: YTN; PAM sequence: TTT
  source 1..20: mol_type = other DNA
ttaaaaacaggttcttccgt

SEQ ID NO: 16741 - DNA, 20 bp, synthetic construct
  misc_feature 1..20: note = Description of Artificial Sequence: Synthetic oligonucleotide
  misc_feature 1..20: note = Target: ANGPTL3; (+) strand; PAM type: YTN; PAM sequence: TTT
  source 1..20: mol_type = other DNA
taaaaacaggttcttccgtg

SEQ ID NO: 16742 - DNA, 20 bp, synthetic construct
  misc_feature 1..20: note = Description of Artificial Sequence: Synthetic oligonucleotide
  misc_feature 1..20: note = Target: ANGPTL3; (+) strand; PAM type: YTN; PAM sequence: TTT
  source 1..20: mol_type = other DNA
aaaaacaggttcttccgtgt

SEQ ID NO: 16743 - DNA, 20 bp, synthetic construct
  misc_feature 1..20: note = Description of Artificial Sequence: Synthetic oligonucleotide
  misc_feature 1..20: note = Target: ANGPTL3; (+) strand; PAM type: YTN; PAM sequence: TTA
  source 1..20: mol_type = other DNA
aaaacaggttcttccgtgtc

SEQ ID NO: 16744 - DNA, 20 bp, synthetic construct
  misc_feature 1..20: note = Description of Artificial Sequence: Synthetic oligonucleotide
  misc_feature 1..20: note = Target: ANGPTL3; (+) strand; PAM type: YTN; PAM sequence: TTC
  source 1..20: mol_type = other DNA
ttccgtgtcatttttcacat

SEQ ID NO: 16745 - DNA, 20 bp, synthetic construct
  misc_feature 1..20: note = Description of Artificial Sequence: Synthetic oligonucleotide
  misc_feature 1..20: note = Target: ANGPTL3; (+) strand; PAM type: YTN; PAM sequence: CTT
  source 1..20: mol_type = other DNA
ccgtgtcatttttcacattc

SEQ ID NO: 16746 - DNA, 20 bp, synthetic construct
  misc_feature 1..20: note = Description of Artificial Sequence: Synthetic oligonucleotide
  misc_feature 1..20: note = Target: ANGPTL3; (+) strand; PAM type: YTN; PAM sequence: TTC
  source 1..20: mol_type = other DNA
cgtgtcatttttcacattcc

SEQ ID NO: 16747 - DNA, 20 bp, synthetic construct
  misc_feature 1..20: note = Description of Artificial Sequence: Synthetic oligonucleotide
  misc_feature 1..20: note = Target: ANGPTL3; (+) strand; PAM type: YTN; PAM sequence: TTT
  source 1..20: mol_type = other DNA
ttcacattcctttaagtaaa

SEQ ID NO: 16748 - DNA, 20 bp, synthetic construct
  misc_feature 1..20: note = Description of Artificial Sequence: Synthetic oligonucleotide
  misc_feature 1..20: note = Target: ANGPTL3; (+) strand; PAM type: YTN; PAM sequence: TTT
  source 1..20: mol_type = other DNA
tcacattcctttaagtaaat

SEQ ID NO: 16749 - DNA, 20 bp, synthetic construct
  misc_feature 1..20: note = Description of Artificial Sequence: Synthetic oligonucleotide
  misc_feature 1..20: note = Target: ANGPTL3; (+) strand; PAM type: YTN; PAM sequence: TTT
  source 1..20: mol_type = other DNA
cacattcctttaagtaaata

SEQ ID NO: 16750 - DNA, 20 bp, synthetic construct
  misc_feature 1..20: note = Description of Artificial Sequence: Synthetic oligonucleotide
  misc_feature 1..20: note = Target: ANGPTL3; (+) strand; PAM type: YTN; PAM sequence: TTC
  source 1..20: mol_type = other DNA
acattcctttaagtaaataa

SEQ ID NO: 16751 - DNA, 20 bp, synthetic construct
  misc_feature 1..20: note = Description of Artificial Sequence: Synthetic oligonucleotide
  misc_feature 1..20: note = Target: ANGPTL3; (+) strand; PAM type: YTN; PAM sequence: TTC
  source 1..20: mol_type = other DNA
ctttaagtaaataatctcta

SEQ ID NO: 16752 - DNA, 20 bp, synthetic construct
  misc_feature 1..20: note = Description of Artificial Sequence: Synthetic oligonucleotide
  misc_feature 1..20: note = Target: ANGPTL3; (+) strand; PAM type: YTN; PAM sequence: CTT
  source 1..20: mol_type = other DNA
taagtaaataatctctacaa

SEQ ID NO: 16753 - DNA, 20 bp, synthetic construct
  misc_feature 1..20: note = Description of Artificial Sequence: Synthetic oligonucleotide
  misc_feature 1..20: note = Target: ANGPTL3; (+) strand; PAM type: YTN; PAM sequence: TTT
  source 1..20: mol_type = other DNA
aagtaaataatctctacaaa

SEQ ID NO: 16754 - DNA, 20 bp, synthetic construct
  misc_feature 1..20: note = Description of Artificial Sequence: Synthetic oligonucleotide
  misc_feature 1..20: note = Target: ANGPTL3; (+) strand; PAM type: YTN; PAM sequence: TTA
  source 1..20: mol_type = other DNA
agtaaataatctctacaaac

SEQ ID NO: 16755 - DNA, 20 bp, synthetic construct
  misc_feature 1..20: note = Description of Artificial Sequence: Synthetic oligonucleotide
  misc_feature 1..20: note = Target: ANGPTL3; (+) strand; PAM type: YTN; PAM sequence: CTC
  source 1..20: mol_type = other DNA
tacaaacgcttcctaactga

SEQ ID NO: 16756 - DNA, 20 bp, synthetic construct
  misc_feature 1..20: note = Description of Artificial Sequence: Synthetic oligonucleotide
  misc_feature 1..20: note = Target: ANGPTL3; (+) strand; PAM type: YTN; PAM sequence: CTA
  source 1..20: mol_type = other DNA
caaacgcttcctaactgaac

SEQ ID NO: 16757 - DNA, 20 bp, synthetic construct
  misc_feature 1..20: note = Description of Artificial Sequence: Synthetic oligonucleotide
  misc_feature 1..20: note = Target: ANGPTL3; (+) strand; PAM type: YTN; PAM sequence: CTT
  source 1..20: mol_type = other DNA
cctaactgaacatattataa

SEQ ID NO: 16758 - DNA, 20 bp, synthetic construct
  misc_feature 1..20: note = Description of Artificial Sequence: Synthetic oligonucleotide
  misc_feature 1..20: note = Target: ANGPTL3; (+) strand; PAM type: YTN; PAM sequence: TTC
  source 1..20: mol_type = other DNA
ctaactgaacatattataat

SEQ ID NO: 16759 - DNA, 20 bp, synthetic construct
  misc_feature 1..20: note = Description of Artificial Sequence: Synthetic oligonucleotide
  misc_feature 1..20: note = Target: ANGPTL3; (+) strand; PAM type: YTN; PAM sequence: CTA
  source 1..20: mol_type = other DNA
actgaacatattataattct

SEQ ID NO: 16760 - DNA, 20 bp, synthetic construct
  misc_feature 1..20: note = Description of Artificial Sequence: Synthetic oligonucleotide
  misc_feature 1..20: note = Target: ANGPTL3; (+) strand; PAM type: YTN; PAM sequence: CTG
  source 1..20: mol_type = other DNA
aacatattataattctcagg

SEQ ID NO: 16761 - DNA, 20 bp, synthetic construct
  misc_feature 1..20: note = Description of Artificial Sequence: Synthetic oligonucleotide
  misc_feature 1..20: note = Target: ANGPTL3; (+) strand; PAM type: YTN; PAM sequence: TTA
  source 1..20: mol_type = other DNA
taattctcaggacagaagaa

SEQ ID NO: 16762 - DNA, 20 bp, synthetic construct
  misc_feature 1..20: note = Description of Artificial Sequence: Synthetic oligonucleotide
  misc_feature 1..20: note = Target: ANGPTL3; (+) strand; PAM type: YTN; PAM sequence: TTC
  source 1..20: mol_type = other DNA
tcaggacagaagaacaaaac

SEQ ID NO: 16763 - DNA, 20 bp, synthetic construct
  misc_feature 1..20: note = Description of Artificial Sequence: Synthetic oligonucleotide
  misc_feature 1..20: note = Target: ANGPTL3; (+) strand; PAM type: YTN; PAM sequence: CTC
  source 1..20: mol_type = other DNA
aggacagaagaacaaaactg

SEQ ID NO: 16764 - DNA, 20 bp, synthetic construct
  misc_feature 1..20: note = Description of Artificial Sequence: Synthetic oligonucleotide
  misc_feature 1..20: note = Target: ANGPTL3; (+) strand; PAM type: YTN; PAM sequence: CTG
  source 1..20: mol_type = other DNA
cccttctcagagtttgcatc

SEQ ID NO: 16765 - DNA, 20 bp, synthetic construct
  misc_feature 1..20: note = Description of Artificial Sequence: Synthetic oligonucleotide
  misc_feature 1..20: note = Target: ANGPTL3; (+) strand; PAM type: YTN; PAM sequence: CTT
  source 1..20: mol_type = other DNA
ctcagagtttgcatctgttt

SEQ ID NO: 16766 - DNA, 20 bp, synthetic construct
  misc_feature 1..20: note = Description of Artificial Sequence: Synthetic oligonucleotide
  misc_feature 1..20: note = Target: ANGPTL3; (+) strand; PAM type: YTN; PAM sequence: TTC
  source 1..20: mol_type = other DNA
tcagagtttgcatctgtttc

SEQ ID NO: 16767 - DNA, 20 bp, synthetic construct
  misc_feature 1..20: note = Description of Artificial Sequence: Synthetic oligonucleotide
  misc_feature 1..20: note = Target: ANGPTL3; (+) strand; PAM type: YTN; PAM sequence: CTC
  source 1..20: mol_type = other DNA
agagtttgcatctgtttctg

SEQ ID NO: 16768 - DNA, 20 bp, synthetic construct
  misc_feature 1..20: note = Description of Artificial Sequence: Synthetic oligonucleotide
  misc_feature 1..20: note = Target: ANGPTL3; (+) strand; PAM type: YTN; PAM sequence: TTT
  source 1..20: mol_type = other DNA
gcatctgtttctggaacttt

SEQ ID NO: 16769 - DNA, 20 bp, synthetic construct
  misc_feature 1..20: note = Description of Artificial Sequence: Synthetic oligonucleotide
  misc_feature 1..20: note = Target: ANGPTL3; (+) strand; PAM type: YTN; PAM sequence: TTG
  source 1..20: mol_type = other DNA
catctgtttctggaacttta

SEQ ID NO: 16770 - DNA, 20 bp, synthetic construct
  misc_feature 1..20: note = Description of Artificial Sequence: Synthetic oligonucleotide
  misc_feature 1..20: note = Target: ANGPTL3; (+) strand; PAM type: YTN; PAM sequence: CTG
  source 1..20: mol_type = other DNA
tttctggaactttactcctt

SEQ ID NO: 16771 - DNA, 20 bp, synthetic construct
  misc_feature 1..20: note = Description of Artificial Sequence: Synthetic oligonucleotide
  misc_feature 1..20: note = Target: ANGPTL3; (+) strand; PAM type: YTN; PAM sequence: TTT
  source 1..20: mol_type = other DNA
ctggaactttactccttccc

SEQ ID NO: 16772 - DNA, 20 bp, synthetic construct
  misc_feature 1..20: note = Description of Artificial Sequence: Synthetic oligonucleotide
  misc_feature 1..20: note = Target: ANGPTL3; (+) strand; PAM type: YTN; PAM sequence: TTC
  source 1..20: mol_type = other DNA
tggaactttactccttccct

SEQ ID NO: 16773 - DNA, 20 bp, synthetic construct
  misc_feature 1..20: note = Description of Artificial Sequence: Synthetic oligonucleotide
  misc_feature 1..20: note = Target: ANGPTL3; (+) strand; PAM type: YTN; PAM sequence: CTG
  source 1..20: mol_type = other DNA
gaactttactccttcccttc

SEQ ID NO: 16774 - DNA, 20 bp, synthetic construct
  misc_feature 1..20: note = Description of Artificial Sequence: Synthetic oligonucleotide
  misc_feature 1..20: note = Target: ANGPTL3; (+) strand; PAM type: YTN; PAM sequence: CTT
  source 1..20: mol_type = other DNA
tactccttcccttcacaatc

SEQ ID NO: 16775 - DNA, 20 bp, synthetic construct
  misc_feature 1..20: note = Description of Artificial Sequence: Synthetic oligonucleotide
  misc_feature 1..20: note = Target: ANGPTL3; (+) strand; PAM type: YTN; PAM sequence: TTT
  source 1..20: mol_type = other DNA
actccttcccttcacaatct

SEQ ID NO: 16776 - DNA, 20 bp, synthetic construct
  misc_feature 1..20: note = Description of Artificial Sequence: Synthetic oligonucleotide
  misc_feature 1..20: note = Target: ANGPTL3; (+) strand; PAM type: YTN; PAM sequence: TTA
  source 1..20: mol_type = other DNA
ctccttcccttcacaatcta

SEQ ID NO: 16777 - DNA, 20 bp, synthetic construct
  misc_feature 1..20: note = Description of Artificial Sequence: Synthetic oligonucleotide
  misc_feature 1..20: note = Target: ANGPTL3; (+) strand; PAM type: YTN; PAM sequence: CTC
  source 1..20: mol_type = other DNA
cttcccttcacaatctaaga

SEQ ID NO: 16778 - DNA, 20 bp, synthetic construct
  misc_feature 1..20: note = Description of Artificial Sequence: Synthetic oligonucleotide
  misc_feature 1..20: note = Target: ANGPTL3; (+) strand; PAM type: YTN; PAM sequence: CTT
  source 1..20: mol_type = other DNA
cccttcacaatctaagataa

SEQ ID NO: 16779 - DNA, 20 bp, synthetic construct
  misc_feature 1..20: note = Description of Artificial Sequence: Synthetic oligonucleotide
  misc_feature 1..20: note = Target: ANGPTL3; (+) strand; PAM type: YTN; PAM sequence: TTC
  source 1..20: mol_type = other DNA
ccttcacaatctaagataac

SEQ ID NO: 16780 - DNA, 20 bp, synthetic construct
  misc_feature 1..20: note = Description of Artificial Sequence: Synthetic oligonucleotide
  misc_feature 1..20: note = Target: ANGPTL3; (+) strand; PAM type: YTN; PAM sequence: CTT
  source 1..20: mol_type = other DNA
cacaatctaagataacactc

SEQ ID NO: 16781 - DNA, 20 bp, synthetic construct
  misc_feature 1..20: note = Description of Artificial Sequence: Synthetic oligonucleotide
  misc_feature 1..20: note = Target: ANGPTL3; (+) strand; PAM type: YTN; PAM sequence: TTC
  source 1..20: mol_type = other DNA
acaatctaagataacactcc

SEQ ID NO: 16782 - DNA, 20 bp, synthetic construct
  misc_feature 1..20: note = Description of Artificial Sequence: Synthetic oligonucleotide
  misc_feature 1..20: note = Target: ANGPTL3; (+) strand; PAM type: YTN; PAM sequence: CTA
  source 1..20: mol_type = other DNA
agataacactccatcacctt

SEQ ID NO: 16783 - DNA, 20 bp, synthetic construct
  misc_feature 1..20: note = Description of Artificial Sequence: Synthetic oligonucleotide
  misc_feature 1..20: note = Target: ANGPTL3; (+) strand; PAM type: YTN; PAM sequence: CTC
  source 1..20: mol_type = other DNA
catcaccttcagatgcaagc

SEQ ID NO: 16784 - DNA, 20 bp, synthetic construct
  misc_feature 1..20: note = Description of Artificial Sequence: Synthetic oligonucleotide
  misc_feature 1..20: note = Target: ANGPTL3; (+) strand; PAM type: YTN; PAM sequence: CTT
  source 1..20: mol_type = other DNA
cagatgcaagcccctaacta

SEQ ID NO: 16785 - DNA, 20 bp, synthetic construct
  misc_feature 1..20: note = Description of Artificial Sequence: Synthetic oligonucleotide
  misc_feature 1..20: note = Target: ANGPTL3; (+) strand; PAM type: YTN; PAM sequence: TTC
  source 1..20: mol_type = other DNA
agatgcaagcccctaactaa

SEQ ID NO: 16786 - DNA, 20 bp, synthetic construct
  misc_feature 1..20: note = Description of Artificial Sequence: Synthetic oligonucleotide
  misc_feature 1..20: note = Target: ANGPTL3; (+) strand; PAM type: YTN; PAM sequence: CTA
  source 1..20: mol_type = other DNA
actaaaaacttctgggtggc

SEQ ID NO: 16787 - DNA, 20 bp, synthetic construct
  misc_feature 1..20: note = Description of Artificial Sequence: Synthetic oligonucleotide
  misc_feature 1..20: note = Target: ANGPTL3; (+) strand; PAM type: YTN; PAM sequence: CTA
  source 1..20: mol_type = other DNA
aaaacttctgggtggctatg

SEQ ID NO: 16788 - DNA, 20 bp, synthetic construct
  misc_feature 1..20: note = Description of Artificial Sequence: Synthetic oligonucleotide
  misc_feature 1..20: note = Target: ANGPTL3; (+) strand; PAM type: YTN; PAM sequence: CTT
  source 1..20: mol_type = other DNA
ctgggtggctatgttaaaat

SEQ ID NO: 16789 - DNA, 20 bp, synthetic construct
  misc_feature 1..20: note = Description of Artificial Sequence: Synthetic oligonucleotide
  misc_feature 1..20: note = Target: ANGPTL3; (+) strand; PAM type: YTN; PAM sequence: TTC
  source 1..20: mol_type = other DNA
tgggtggctatgttaaaatg

SEQ ID NO: 16790 - DNA, 20 bp, synthetic construct
  misc_feature 1..20: note = Description of Artificial Sequence: Synthetic oligonucleotide
  misc_feature 1..20: note = Target: ANGPTL3; (+) strand; PAM type: YTN; PAM sequence: CTG
  source 1..20: mol_type = other DNA
ggtggctatgttaaaatgtt

SEQ ID NO: 16791 - DNA, 20 bp, synthetic construct
  misc_feature 1..20: note = Description of Artificial Sequence: Synthetic oligonucleotide
  misc_feature 1..20: note = Target: ANGPTL3; (+) strand; PAM type: YTN; PAM sequence: CTA
  source 1..20: mol_type = other DNA
tgttaaaatgttaggaaata

SEQ ID NO: 16792 - DNA, 20 bp, synthetic construct
  misc_feature 1..20: note = Description of Artificial Sequence: Synthetic oligonucleotide
  misc_feature 1..20: note = Target: ANGPTL3; (+) strand; PAM type: YTN; PAM sequence: TTA
  source 1..20: mol_type = other DNA
aaatgttaggaaatagagct

SEQ ID NO: 16793 - DNA, 20 bp, synthetic construct
  misc_feature 1..20: note = Description of Artificial Sequence: Synthetic oligonucleotide
  misc_feature 1..20: note = Target: ANGPTL3; (+) strand; PAM type: YTN; PAM sequence: TTA
  source 1..20: mol_type = other DNA
ggaaatagagctcttgactc

SEQ ID NO: 16794 - DNA, 20 bp, synthetic construct
  misc_feature 1..20: note = Description of Artificial Sequence: Synthetic oligonucleotide
  misc_feature 1..20: note = Target: ANGPTL3; (+) strand; PAM type: YTN; PAM sequence: CTC
  source 1..20: mol_type = other DNA
ttgactcagaattctttttt

SEQ ID NO: 16795 - DNA, 20 bp, synthetic construct
  misc_feature 1..20: note = Description of Artificial Sequence: Synthetic oligonucleotide
  misc_feature 1..20: note = Target: ANGPTL3; (+) strand; PAM type: YTN; PAM sequence: CTT
  source 1..20: mol_type = other DNA
gactcagaattctttttttt

SEQ ID NO: 16796 - DNA, 20 bp, synthetic construct
  misc_feature 1..20: note = Description of Artificial Sequence: Synthetic oligonucleotide
  misc_feature 1..20: note = Target: ANGPTL3; (+) strand; PAM type: YTN; PAM sequence: TTG
  source 1..20: mol_type = other DNA
actcagaattcttttttttt

SEQ ID NO: 16797 - DNA, 20 bp, synthetic construct
  misc_feature 1..20: note = Description of Artificial Sequence: Synthetic oligonucleotide
  misc_feature 1..20: note = Target: ANGPTL3; (+) strand; PAM type: YTN; PAM sequence: CTC
  source 1..20: mol_type = other DNA
agaattcttttttttttcga

SEQ ID NO: 16798 - DNA, 20 bp, synthetic construct
  misc_feature 1..20: note = Description of Artificial Sequence: Synthetic oligonucleotide
  misc_feature 1..20: note = Target: ANGPTL3; (+) strand; PAM type: YTN; PAM sequence: TTC
  source 1..20: mol_type = other DNA
ttttttttttcgagatggag

SEQ ID NO: 16799 - DNA, 20 bp, synthetic construct
  misc_feature 1..20: note = Description of Artificial Sequence: Synthetic oligonucleotide
  misc_feature 1..20: note = Target: ANGPTL3; (+) strand; PAM type: YTN; PAM sequence: CTT
  source 1..20: mol_type = other DNA
ttttttttcgagatggagtc

SEQ ID NO: 16800 - DNA, 20 bp, synthetic construct
  misc_feature 1..20: note = Description of Artificial Sequence: Synthetic oligonucleotide
  misc_feature 1..20: note = Target: ANGPTL3; (+) strand; PAM type: YTN; PAM sequence: TTT
  source 1..20: mol_type = other DNA
tttttttcgagatggagtct

SEQ ID NO: 16801 - DNA, 20 bp, synthetic construct
  misc_feature 1..20: note = Description of Artificial Sequence: Synthetic oligonucleotide
  misc_feature 1..20: note = Target: ANGPTL3; (+) strand; PAM type: YTN; PAM sequence: TTT
  source 1..20: mol_type = other DNA
ttttttcgagatggagtctc

SEQ ID NO: 16802 - DNA, 20 bp, synthetic construct
  misc_feature 1..20: note = Description of Artificial Sequence: Synthetic oligonucleotide
  misc_feature 1..20: note = Target: ANGPTL3; (+) strand; PAM type: YTN; PAM sequence: TTT
  source 1..20: mol_type = other DNA
tttttcgagatggagtctcg

SEQ ID NO: 16803 - DNA, 20 bp, synthetic construct
  misc_feature 1..20: note = Description of Artificial Sequence: Synthetic oligonucleotide
  misc_feature 1..20: note = Target: ANGPTL3; (+) strand; PAM type: YTN; PAM sequence: TTT
  source 1..20: mol_type = other DNA
ttttcgagatggagtctcgc

SEQ ID NO: 16804 - DNA, 20 bp, synthetic construct
  misc_feature 1..20: note = Description of Artificial Sequence: Synthetic oligonucleotide
  misc_feature 1..20: note = Target: ANGPTL3; (+) strand; PAM type: YTN; PAM sequence: TTT
  source 1..20: mol_type = other DNA
tttcgagatggagtctcgct

SEQ ID NO: 16805 - DNA, 20 bp, synthetic construct
  misc_feature 1..20: note = Description of Artificial Sequence: Synthetic oligonucleotide
  misc_feature 1..20: note = Target: ANGPTL3; (+) strand; PAM type: YTN; PAM sequence: TTT
  source 1..20: mol_type = other DNA
ttcgagatggagtctcgctc

SEQ ID NO: 16806 - DNA, 20 bp, synthetic construct
  misc_feature 1..20: note = Description of Artificial Sequence: Synthetic oligonucleotide
  misc_feature 1..20: note = Target: ANGPTL3; (+) strand; PAM type: YTN; PAM sequence: TTT
  source 1..20: mol_type = other DNA
tcgagatggagtctcgctct

SEQ ID NO: 16807 - DNA, 20 bp, synthetic construct
  misc_feature 1..20: note = Description of Artificial Sequence: Synthetic oligonucleotide
  misc_feature 1..20: note = Target: ANGPTL3; (+) strand; PAM type: YTN; PAM sequence: TTT
  source 1..20: mol_type = other DNA
cgagatggagtctcgctctg

SEQ ID NO: 16808 - DNA, 20 bp, synthetic construct
  misc_feature 1..20: note = Description of Artificial Sequence: Synthetic oligonucleotide
  misc_feature 1..20: note = Target: ANGPTL3; (+) strand; PAM type: YTN; PAM sequence: TTC
  source 1..20: mol_type = other DNA
gagatggagtctcgctctgt

SEQ ID NO: 16809 - DNA, 20 bp, synthetic construct
  misc_feature 1..20: note = Description of Artificial Sequence: Synthetic oligonucleotide
  misc_feature 1..20: note = Target: ANGPTL3; (+) strand; PAM type: YTN; PAM sequence: CTC
  source 1..20: mol_type = other DNA
gctctgtcacccaggctgga

SEQ ID NO: 16810 - DNA, 20 bp, synthetic construct
  misc_feature 1..20: note = Description of Artificial Sequence: Synthetic oligonucleotide
  misc_feature 1..20: note = Target: ANGPTL3; (+) strand; PAM type: YTN; PAM sequence: CTC
  source 1..20: mol_type = other DNA
tgtcacccaggctggagtgc

SEQ ID NO: 16811 - DNA, 20 bp, synthetic construct
  misc_feature 1..20: note = Description of Artificial Sequence: Synthetic oligonucleotide
  misc_feature 1..20: note = Target: ANGPTL3; (+) strand; PAM type: YTN; PAM sequence: CTG
  source 1..20: mol_type = other DNA
tcacccaggctggagtgcag

SEQ ID NO: 16812 - DNA, 20 bp, synthetic construct
  misc_feature 1..20: note = Description of Artificial Sequence: Synthetic oligonucleotide
  misc_feature 1..20: note = Target: ANGPTL3; (+) strand; PAM type: YTN; PAM sequence: CTG
  source 1..20: mol_type = other DNA
gagtgcagtggcactgcaca

SEQ ID NO: 16813 - DNA, 20 bp, synthetic construct
  misc_feature 1..20: note = Description of Artificial Sequence: Synthetic oligonucleotide
  misc_feature 1..20: note = Target: ANGPTL3; (+) strand; PAM type: YTN; PAM sequence: CTG
  source 1..20: mol_type = other DNA
cacagtgagctgagtgatct

SEQ ID NO: 16814 - DNA, 20 bp, synthetic construct
  misc_feature 1..20: note = Description of Artificial Sequence: Synthetic oligonucleotide
  misc_feature 1..20: note = Target: ANGPTL3; (+) strand; PAM type: YTN; PAM sequence: CTG
  source 1..20: mol_type = other DNA
agtgatctcagctctctgca

SEQ ID NO: 16815 - DNA, 20 bp, synthetic construct
  misc_feature 1..20: note = Description of Artificial Sequence: Synthetic oligonucleotide
  misc_feature 1..20: note = Target: ANGPTL3; (+) strand; PAM type: YTN; PAM sequence: CTC
  source 1..20: mol_type = other DNA
agctctctgcaacctccgcc

SEQ ID NO: 16816 - DNA, 20 bp, synthetic construct
  misc_feature 1..20: note = Description of Artificial Sequence: Synthetic oligonucleotide
  misc_feature 1..20: note = Target: ANGPTL3; (+) strand; PAM type: YTN; PAM sequence: CTC
  source 1..20: mol_type = other DNA
tctgcaacctccgcctcctg

SEQ ID NO: 16817 - DNA, 20 bp, synthetic construct
  misc_feature 1..20: note = Description of Artificial Sequence: Synthetic oligonucleotide
  misc_feature 1..20: note = Target: ANGPTL3; (+) strand; PAM type: YTN; PAM sequence: CTC
  source 1..20: mol_type = other DNA
tgcaacctccgcctcctggg

SEQ ID NO: 16818 - DNA, 20 bp, synthetic construct
  misc_feature 1..20: note = Description of Artificial Sequence: Synthetic oligonucleotide
  misc_feature 1..20: note = Target: ANGPTL3; (+) strand; PAM type: YTN; PAM sequence: CTG
  source 1..20: mol_type = other DNA
caacctccgcctcctgggtt

SEQ ID NO: 16819 - DNA, 20 bp, synthetic construct
  misc_feature 1..20: note = Description of Artificial Sequence: Synthetic oligonucleotide
  misc_feature 1..20: note = Target: ANGPTL3; (+) strand; PAM type: YTN; PAM sequence: CTC
  source 1..20: mol_type = other DNA
cgcctcctgggttcaagtga

SEQ ID NO: 16820 - DNA, 20 bp, synthetic construct
  misc_feature 1..20: note = Description of Artificial Sequence: Synthetic oligonucleotide
  misc_feature 1..20: note = Target: ANGPTL3; (+) strand; PAM type: YTN; PAM sequence: CTC
  source 1..20: mol_type = other DNA
ctgggttcaagtgattctcc

SEQ ID NO: 16821 - DNA, 20 bp, synthetic construct
  misc_feature 1..20: note = Description of Artificial Sequence: Synthetic oligonucleotide
  misc_feature 1..20: note = Target: ANGPTL3; (+) strand; PAM type: YTN; PAM sequence: CTG
  source 1..20: mol_type = other DNA
ggttcaagtgattctcctgc

SEQ ID NO: 16822 - DNA, 20 bp, synthetic construct
  misc_feature 1..20: note = Description of Artificial Sequence: Synthetic oligonucleotide
  misc_feature 1..20: note = Target: ANGPTL3; (+) strand; PAM type: YTN; PAM sequence: TTC
  source 1..20: mol_type = other DNA
aagtgattctcctgcctcag

SEQ ID NO: 16823 - DNA, 20 bp, synthetic construct
  misc_feature 1..20: note = Description of Artificial Sequence: Synthetic oligonucleotide
  misc_feature 1..20: note = Target: ANGPTL3; (+) strand; PAM type: YTN; PAM sequence: TTC
  source 1..20: mol_type = other DNA
tcctgcctcagactcctgag

SEQ ID NO: 16824 - DNA, 20 bp, synthetic construct
  misc_feature 1..20: note = Description of Artificial Sequence: Synthetic oligonucleotide
  misc_feature 1..20: note = Target: ANGPTL3; (+) strand; PAM type: YTN; PAM sequence: CTC
  source 1..20: mol_type = other DNA
ctgcctcagactcctgagta

SEQ ID NO: 16825 - DNA, 20 bp, synthetic construct
  misc_feature 1..20: note = Description of Artificial Sequence: Synthetic oligonucleotide
  misc_feature 1..20: note = Target: ANGPTL3; (+) strand; PAM type: YTN; PAM sequence: CTG
  source 1..20: mol_type = other DNA
cctcagactcctgagtagct

SEQ ID NO: 16826 - DNA, 20 bp, synthetic construct
  misc_feature 1..20: note = Description of Artificial Sequence: Synthetic oligonucleotide
  misc_feature 1..20: note = Target: ANGPTL3; (+) strand; PAM type: YTN; PAM sequence: CTC
  source 1..20: mol_type = other DNA
agactcctgagtagctagga

SEQ ID NO: 16827 - DNA, 20 bp, synthetic construct
  misc_feature 1..20: note = Description of Artificial Sequence: Synthetic oligonucleotide
  misc_feature 1..20: note = Target: ANGPTL3; (+) strand; PAM type: YTN; PAM sequence: CTC
  source 1..20: mol_type = other DNA
ctgagtagctaggattacag

SEQ ID NO: 16828 - DNA, 20 bp, synthetic construct
  misc_feature 1..20: note = Description of Artificial Sequence: Synthetic oligonucleotide
  misc_feature 1..20: note = Target: ANGPTL3; (+) strand; PAM type: YTN; PAM sequence: CTG
  source 1..20: mol_type = other DNA
agtagctaggattacaggta

SEQ ID NO: 16829 - DNA, 20 bp, synthetic construct
  misc_feature 1..20: note = Description of Artificial Sequence: Synthetic oligonucleotide
  misc_feature 1..20: note = Target: ANGPTL3; (+) strand; PAM type: YTN; PAM sequence: CTA
  source 1..20: mol_type = other DNA
ggattacaggtatgtgccac

SEQ ID NO: 16830 - DNA, 20 bp, synthetic construct
  misc_feature 1..20: note = Description of Artificial Sequence: Synthetic oligonucleotide
  misc_feature 1..20: note = Target: ANGPTL3; (+) strand; PAM type: YTN; PAM sequence: TTA
  source 1..20: mol_type = other DNA
caggtatgtgccaccatgcc

SEQ ID NO: 16831 - DNA, 20 bp, synthetic construct
  misc_feature 1..20: note = Description of Artificial Sequence: Synthetic oligonucleotide
  misc_feature 1..20: note = Target: ANGPTL3; (+) strand; PAM type: YTN; PAM sequence: CTG
  source 1..20: mol_type = other DNA
gctaatttttgtatttttag

SEQ ID NO: 16832 - DNA, 20 bp, synthetic construct
  misc_feature 1..20: note = Description of Artificial Sequence: Synthetic oligonucleotide
  misc_feature 1..20: note = Target: ANGPTL3; (+) strand; PAM type: YTN; PAM sequence: CTA
  source 1..20: mol_type = other DNA
atttttgtatttttagtaga

SEQ ID NO: 16833 - DNA, 20 bp, synthetic construct
  misc_feature 1..20: note = Description of Artificial Sequence: Synthetic oligonucleotide
  misc_feature 1..20: note = Target: ANGPTL3; (+) strand; PAM type: YTN; PAM sequence: TTT
  source 1..20: mol_type = other DNA
ttgtatttttagtagagacg

SEQ ID NO: 16834 - DNA, 20 bp, synthetic construct
  misc_feature 1..20: note = Description of Artificial Sequence: Synthetic oligonucleotide
  misc_feature 1..20: note = Target: ANGPTL3; (+) strand; PAM type: YTN; PAM sequence: TTT
  source 1..20: mol_type = other DNA
tgtatttttagtagagacgg

SEQ ID NO: 16835 - DNA, 20 bp, synthetic construct
  misc_feature 1..20: note = Description of Artificial Sequence: Synthetic oligonucleotide
  misc_feature 1..20: note = Target: ANGPTL3; (+) strand; PAM type: YTN; PAM sequence: TTT
  source 1..20: mol_type = other DNA
gtatttttagtagagacgga

SEQ ID NO: 16836 - DNA, 20 bp, synthetic construct
  misc_feature 1..20: note = Description of Artificial Sequence: Synthetic oligonucleotide
  misc_feature 1..20: note = Target: ANGPTL3; (+) strand; PAM type: YTN; PAM sequence: TTG
  source 1..20: mol_type = other DNA
tatttttagtagagacggag

SEQ ID NO: 16837 - DNA, 20 bp, synthetic construct
  misc_feature 1..20: note = Description of Artificial Sequence: Synthetic oligonucleotide
  misc_feature 1..20: note = Target: ANGPTL3; (+) strand; PAM type: YTN; PAM sequence: TTT
  source 1..20: mol_type = other DNA
ttagtagagacggagtttca

SEQ ID NO: 16838 - DNA, 20 bp, synthetic construct
  misc_feature 1..20: note = Description of Artificial Sequence: Synthetic oligonucleotide
  misc_feature 1..20: note = Target: ANGPTL3; (+) strand; PAM type: YTN; PAM sequence: TTT
  source 1..20: mol_type = other DNA
tagtagagacggagtttcat

SEQ ID NO: 16839 - DNA, 20 bp, synthetic construct
  misc_feature 1..20: note = Description of Artificial Sequence: Synthetic oligonucleotide
  misc_feature 1..20: note = Target: ANGPTL3; (+) strand; PAM type: YTN; PAM sequence: TTT
  source 1..20: mol_type = other DNA
agtagagacggagtttcatc

SEQ ID NO: 16840 - DNA, 20 bp, synthetic construct
  misc_feature 1..20: note = Description of Artificial Sequence: Synthetic oligonucleotide
  misc_feature 1..20: note = Target: ANGPTL3; (+) strand; PAM type: YTN; PAM sequence: TTA
  source 1..20: mol_type = other DNA
gtagagacggagtttcatca

SEQ ID NO: 16841 - DNA, 20 bp, synthetic construct
  misc_feature 1..20: note = Description of Artificial Sequence: Synthetic oligonucleotide
  misc_feature 1..20: note = Target: ANGPTL3; (+) strand; PAM type: YTN; PAM sequence: TTT
  source 1..20: mol_type = other DNA
catcatgttggtcaggctgg

SEQ ID NO: 16842 - DNA, 20 bp, synthetic construct
  misc_feature 1..20: note = Description of Artificial Sequence: Synthetic oligonucleotide
  misc_feature 1..20: note = Target: ANGPTL3; (+) strand; PAM type: YTN; PAM sequence: TTC
  source 1..20: mol_type = other DNA
atcatgttggtcaggctggt

SEQ ID NO: 16843 - DNA, 20 bp, synthetic construct
  misc_feature 1..20: note = Description of Artificial Sequence: Synthetic oligonucleotide
  misc_feature 1..20: note = Target: ANGPTL3; (+) strand; PAM type: YTN; PAM sequence: TTG
  source 1..20: mol_type = other DNA
gtcaggctggtcccgaactc

SEQ ID NO: 16844 - DNA, 20 bp, synthetic construct
  misc_feature 1..20: note = Description of Artificial Sequence: Synthetic oligonucleotide
  misc_feature 1..20: note = Target: ANGPTL3; (+) strand; PAM type: YTN; PAM sequence: CTG
  source 1..20: mol_type = other DNA
gtcccgaactcctgacctcg

SEQ ID NO: 16845 - DNA, 20 bp, synthetic construct
  misc_feature 1..20: note = Description of Artificial Sequence: Synthetic oligonucleotide
  misc_feature 1..20: note = Target: ANGPTL3; (+) strand; PAM type: YTN; PAM sequence: CTC
  source 1..20: mol_type = other DNA
ctgacctcgtgatccgcctt

SEQ ID NO: 16846 - DNA, 20 bp, synthetic construct
  misc_feature 1..20: note = Description of Artificial Sequence: Synthetic oligonucleotide
  misc_feature 1..20: note = Target: ANGPTL3; (+) strand; PAM type: YTN; PAM sequence: CTG
  source 1..20: mol_type = other DNA
acctcgtgatccgccttcct

SEQ ID NO: 16847 - DNA, 20 bp, synthetic construct
  misc_feature 1..20: note = Description of Artificial Sequence: Synthetic oligonucleotide
  misc_feature 1..20: note = Target: ANGPTL3; (+) strand; PAM type: YTN; PAM sequence: CTC
  source 1..20: mol_type = other DNA
gtgatccgccttcctcggcc

SEQ ID NO: 16848 - DNA, 20 bp, synthetic construct
  misc_feature 1..20: note = Description of Artificial Sequence: Synthetic oligonucleotide
  misc_feature 1..20: note = Target: ANGPTL3; (+) strand; PAM type: YTN; PAM sequence: CTT
  source 1..20: mol_type = other DNA
cctcggcctcccaaagtgct

SEQ ID NO: 16849 - DNA, 20 bp, synthetic construct
  misc_feature 1..20: note = Description of Artificial Sequence: Synthetic oligonucleotide
  misc_feature 1..20: note = Target: ANGPTL3; (+) strand; PAM type: YTN; PAM sequence: TTC
  source 1..20: mol_type = other DNA
ctcggcctcccaaagtgcta

SEQ ID NO: 16850 - DNA, 20 bp, synthetic construct
  misc_feature 1..20: note = Description of Artificial Sequence: Synthetic oligonucleotide
  misc_feature 1..20: note = Target: ANGPTL3; (+) strand; PAM type: YTN; PAM sequence: CTC
  source 1..20: mol_type = other DNA
ggcctcccaaagtgctaaga

SEQ ID NO: 16851 - DNA, 20 bp, synthetic construct
  misc_feature 1..20: note = Description of Artificial Sequence: Synthetic oligonucleotide
  misc_feature 1..20: note = Target: ANGPTL3; (+) strand; PAM type: YTN; PAM sequence: CTC
  source 1..20: mol_type = other DNA
ccaaagtgctaagattacag

SEQ ID NO: 16852 - DNA, 20 bp, synthetic construct
  misc_feature 1..20: note = Description of Artificial Sequence: Synthetic oligonucleotide
  misc_feature 1..20: note = Target: ANGPTL3; (+) strand; PAM type: YTN; PAM sequence: CTA
  source 1..20: mol_type = other DNA
agattacaggcgtgagcccc

SEQ ID NO: 16853 - DNA, 20 bp, synthetic construct
  misc_feature 1..20: note = Description of Artificial Sequence: Synthetic oligonucleotide
  misc_feature 1..20: note = Target: ANGPTL3; (+) strand; PAM type: YTN; PAM sequence: TTA
  source 1..20: mol_type = other DNA
caggcgtgagcccccgcgcc

SEQ ID NO: 16854 - DNA, 20 bp, synthetic construct
  misc_feature 1..20: note = Description of Artificial Sequence: Synthetic oligonucleotide
  misc_feature 1..20: note = Target: ANGPTL3; (+) strand; PAM type: YTN; PAM sequence: CTC
  source 1..20: mol_type = other DNA
agtttttatagttaaaataa

SEQ ID NO: 16855 - DNA, 20 bp, synthetic construct
  misc_feature 1..20: note = Description of Artificial Sequence: Synthetic oligonucleotide
  misc_feature 1..20: note = Target: ANGPTL3; (+) strand; PAM type: YTN; PAM sequence: TTT
  source 1..20: mol_type = other DNA
ttatagttaaaataaactag

SEQ ID NO: 16856 - DNA, 20 bp, synthetic construct
  misc_feature 1..20: note = Description of Artificial Sequence: Synthetic oligonucleotide
  misc_feature 1..20: note = Target: ANGPTL3; (+) strand; PAM type: YTN; PAM sequence: TTT
  source 1..20: mol_type = other DNA
tatagttaaaataaactagg

SEQ ID NO: 16857 - DNA, 20 bp, synthetic construct
  misc_feature 1..20: note = Description of Artificial Sequence: Synthetic oligonucleotide
  misc_feature 1..20: note = Target: ANGPTL3; (+) strand; PAM type: YTN; PAM sequence: TTT
  source 1..20: mol_type = other DNA
atagttaaaataaactagga

SEQ ID NO: 16858 - DNA, 20 bp, synthetic construct
  misc_feature 1..20: note = Description of Artificial Sequence: Synthetic oligonucleotide
  misc_feature 1..20: note = Target: ANGPTL3; (+) strand; PAM type: YTN; PAM sequence: TTA
  source 1..20: mol_type = other DNA
tagttaaaataaactaggac

SEQ ID NO: 16859 - DNA, 20 bp, synthetic construct
  misc_feature 1..20: note = Description of Artificial Sequence: Synthetic oligonucleotide
  misc_feature 1..20: note = Target: ANGPTL3; (+) strand; PAM type: YTN; PAM sequence: TTA
  source 1..20: mol_type = other DNA
aaataaactaggaccaattc

SEQ ID NO: 16860 - DNA, 20 bp, synthetic construct
  misc_feature 1..20: note = Description of Artificial Sequence: Synthetic oligonucleotide
  misc_feature 1..20: note = Target: ANGPTL3; (+) strand; PAM type: YTN; PAM sequence: CTA
  source 1..20: mol_type = other DNA
ggaccaattcgatagaataa

SEQ ID NO: 16861 - DNA, 20 bp, synthetic construct
  misc_feature 1..20: note = Description of Artificial Sequence: Synthetic oligonucleotide
  misc_feature 1..20: note = Target: ANGPTL3; (+) strand; PAM type: YTN; PAM sequence: TTC
  source 1..20: mol_type = other DNA
gatagaataaaactcagagt

SEQ ID NO: 16862 - DNA, 20 bp, synthetic construct
  misc_feature 1..20: note = Description of Artificial Sequence: Synthetic oligonucleotide
  misc_feature 1..20: note = Target: ANGPTL3; (+) strand; PAM type: YTN; PAM sequence: CTC
  source 1..20: mol_type = other DNA
agagtggtataacaaggaca

SEQ ID NO: 16863 - DNA, 20 bp, synthetic construct
  misc_feature 1..20: note = Description of Artificial Sequence: Synthetic oligonucleotide
  misc_feature 1..20: note = Target: ANGPTL3; (+) strand; PAM type: YTN; PAM sequence: CTT
  source 1..20: mol_type = other DNA
gagacatctatgaactctaa

SEQ ID NO: 16864 - DNA, 20 bp, synthetic construct
  misc_feature 1..20: note = Description of Artificial Sequence: Synthetic oligonucleotide
  misc_feature 1..20: note = Target: ANGPTL3; (+) strand; PAM type: YTN; PAM sequence: TTG
  source 1..20: mol_type = other DNA
agacatctatgaactctaaa

SEQ ID NO: 16865 - DNA, 20 bp, synthetic construct
  misc_feature 1..20: note = Description of Artificial Sequence: Synthetic oligonucleotide
  misc_feature 1..20: note = Target: ANGPTL3; (+) strand; PAM type: YTN; PAM sequence: CTA
  source 1..20: mol_type = other DNA
tgaactctaaaaataaaaac

SEQ ID NO: 16866 - DNA, 20 bp, synthetic construct
  misc_feature 1..20: note = Description of Artificial Sequence: Synthetic oligonucleotide
  misc_feature 1..20: note = Target: ANGPTL3; (+) strand; PAM type: YTN; PAM sequence: CTC
  source 1..20: mol_type = other DNA
taaaaataaaaacaaaaacc

SEQ ID NO: 16867 - DNA, 20 bp, synthetic construct
  misc_feature 1..20: note = Description of Artificial Sequence: Synthetic oligonucleotide
  misc_feature 1..20: note = Target: ANGPTL3; (+) strand; PAM type: YTN; PAM sequence: CTA
  source 1..20: mol_type = other DNA
aaaataaaaacaaaaaccaa

SEQ ID NO: 16868 - DNA, 20 bp, synthetic construct
  misc_feature 1..20: note = Description of Artificial Sequence: Synthetic oligonucleotide
  misc_feature 1..20: note = Target: ANGPTL3; (+) strand; PAM type: YTN; PAM sequence: CTT
  source 1..20: mol_type = other DNA
tctgaagcagagaaccatac

SEQ ID NO: 16869 - DNA, 20 bp, synthetic construct
  misc_feature 1..20: note = Description of Artificial Sequence: Synthetic oligonucleotide
  misc_feature 1..20: note = Target: ANGPTL3; (+) strand; PAM type: YTN; PAM sequence: TTT
  source 1..20: mol_type = other DNA
ctgaagcagagaaccataca

SEQ ID NO: 16870 - DNA, 20 bp, synthetic construct
  misc_feature 1..20: note = Description of Artificial Sequence: Synthetic oligonucleotide
  misc_feature 1..20: note = Target: ANGPTL3; (+) strand; PAM type: YTN; PAM sequence: TTC
  source 1..20: mol_type = other DNA
tgaagcagagaaccatacac

SEQ ID NO: 16871 - DNA, 20 bp, synthetic construct
  misc_feature 1..20: note = Description of Artificial Sequence: Synthetic oligonucleotide
  misc_feature 1..20: note = Target: ANGPTL3; (+) strand; PAM type: YTN; PAM sequence: CTG
  source 1..20: mol_type = other DNA
aagcagagaaccatacactt

SEQ ID NO: 16872 - DNA, 20 bp, synthetic construct
  misc_feature 1..20: note = Description of Artificial Sequence: Synthetic oligonucleotide
  misc_feature 1..20: note = Target: ANGPTL3; (+) strand; PAM type: YTN; PAM sequence: CTT
  source 1..20: mol_type = other DNA
gaatagaaaaaaaaatgctc

SEQ ID NO: 16873 - DNA, 20 bp, synthetic construct
  misc_feature 1..20: note = Description of Artificial Sequence: Synthetic oligonucleotide
  misc_feature 1..20: note = Target: ANGPTL3; (+) strand; PAM type: YTN; PAM sequence: TTG
  source 1..20: mol_type = other DNA
aatagaaaaaaaaatgctcc

SEQ ID NO: 16874 - DNA, 20 bp, synthetic construct
  misc_feature 1..20: note = Description of Artificial Sequence: Synthetic oligonucleotide
  misc_feature 1..20: note = Target: ANGPTL3; (+) strand; PAM type: YTN; PAM sequence: CTC
  source 1..20: mol_type = other DNA
ctgaattttcagtaacgttc

SEQ ID NO: 16875 - DNA, 20 bp, synthetic construct
  misc_feature 1..20: note = Description of Artificial Sequence: Synthetic oligonucleotide
  misc_feature 1..20: note = Target: ANGPTL3; (+) strand; PAM type: YTN; PAM sequence: CTG
  source 1..20: mol_type = other DNA
aattttcagtaacgttcagc

SEQ ID NO: 16876 - DNA, 20 bp, synthetic construct
  misc_feature 1..20: note = Description of Artificial Sequence: Synthetic oligonucleotide
  misc_feature 1..20: note = Target: ANGPTL3; (+) strand; PAM type: YTN; PAM sequence: TTT
  source 1..20: mol_type = other DNA
tcagtaacgttcagctgaaa

SEQ ID NO: 16877 - DNA, 20 bp, synthetic construct
  misc_feature 1..20: note = Description of Artificial Sequence: Synthetic oligonucleotide
  misc_feature 1..20: note = Target: ANGPTL3; (+) strand; PAM type: YTN; PAM sequence: TTT
  source 1..20: mol_type = other DNA
cagtaacgttcagctgaaat

SEQ ID NO: 16878 - DNA, 20 bp, synthetic construct
  misc_feature 1..20: note = Description of Artificial Sequence: Synthetic oligonucleotide
  misc_feature 1..20: note = Target: ANGPTL3; (+) strand; PAM type: YTN; PAM sequence: TTC
  source 1..20: mol_type = other DNA
agtaacgttcagctgaaatt

SEQ ID NO: 16879 - DNA, 20 bp, synthetic construct
  misc_feature 1..20: note = Description of Artificial Sequence: Synthetic oligonucleotide
  misc_feature 1..20: note = Target: ANGPTL3; (+) strand; PAM type: YTN; PAM sequence: TTC
  source 1..20: mol_type = other DNA
agctgaaatttatacttcct

SEQ ID NO: 16880 - DNA, 20 bp, synthetic construct
  misc_feature 1..20: note = Description of Artificial Sequence: Synthetic oligonucleotide
  misc_feature 1..20: note = Target: ANGPTL3; (+) strand; PAM type: YTN; PAM sequence: CTG
  source 1..20: mol_type = other DNA
aaatttatacttccttaaat

SEQ ID NO: 16881 - DNA, 20 bp, synthetic construct
  misc_feature 1..20: note = Description of Artificial Sequence: Synthetic oligonucleotide
  misc_feature 1..20: note = Target: ANGPTL3; (+) strand; PAM type: YTN; PAM sequence: TTT
  source 1..20: mol_type = other DNA
atacttccttaaattatgaa

SEQ ID NO: 16882 - DNA, 20 bp, synthetic construct
  misc_feature 1..20: note = Description of Artificial Sequence: Synthetic oligonucleotide
  misc_feature 1..20: note = Target: ANGPTL3; (+) strand; PAM type: YTN; PAM sequence: TTA
  source 1..20: mol_type = other DNA
tacttccttaaattatgaat

SEQ ID NO: 16883 - DNA, 20 bp, synthetic construct
  misc_feature 1..20: note = Description of Artificial Sequence: Synthetic oligonucleotide
  misc_feature 1..20: note = Target: ANGPTL3; (+) strand; PAM type: YTN; PAM sequence: CTT
  source 1..20: mol_type = other DNA
ccttaaattatgaatgtagt

SEQ ID NO: 16884 - DNA, 20 bp, synthetic construct
  misc_feature 1..20: note = Description of Artificial Sequence: Synthetic oligonucleotide
  misc_feature 1..20: note = Target: ANGPTL3; (+) strand; PAM type: YTN; PAM sequence: TTC
  source 1..20: mol_type = other DNA
cttaaattatgaatgtagta

SEQ ID NO: 16885 - DNA, 20 bp, synthetic construct
  misc_feature 1..20: note = Description of Artificial Sequence: Synthetic oligonucleotide
  misc_feature 1..20: note = Target: ANGPTL3; (+) strand; PAM type: YTN; PAM sequence: CTT
  source 1..20: mol_type = other DNA
aaattatgaatgtagtaaac

SEQ ID NO: 16886 - DNA, 20 bp, synthetic construct
  misc_feature 1..20: note = Description of Artificial Sequence: Synthetic oligonucleotide
  misc_feature 1..20: note = Target: ANGPTL3; (+) strand; PAM type: YTN; PAM sequence: TTA
  source 1..20: mol_type = other DNA
aattatgaatgtagtaaacc

SEQ ID NO: 16887 - DNA, 20 bp, synthetic construct
  misc_feature 1..20: note = Description of Artificial Sequence: Synthetic oligonucleotide
  misc_feature 1..20: note = Target: ANGPTL3; (+) strand; PAM type: YTN; PAM sequence: TTA
  source 1..20: mol_type = other DNA
tgaatgtagtaaaccaacca

SEQ ID NO: 16888 - DNA, 20 bp, synthetic construct
  misc_feature 1..20: note = Description of Artificial Sequence: Synthetic oligonucleotide
  misc_feature 1..20: note = Target: ANGPTL3; (+) strand; PAM type: YTN; PAM sequence: TTA
  source 1..20: mol_type = other DNA
ccagtatataagattttgtc

SEQ ID NO: 16889 - DNA, 20 bp, synthetic construct
  misc_feature 1..20: note = Description of Artificial Sequence: Synthetic oligonucleotide
  misc_feature 1..20: note = Target: ANGPTL3; (+) strand; PAM type: YTN; PAM sequence: TTT
  source 1..20: mol_type = other DNA
tgtcattaatagaaacatac

SEQ ID NO: 16890 - DNA, 20 bp, synthetic construct
  misc_feature 1..20: note = Description of Artificial Sequence: Synthetic oligonucleotide
  misc_feature 1..20: note = Target: ANGPTL3; (+) strand; PAM type: YTN; PAM sequence: TTT
  source 1..20: mol_type = other DNA
gtcattaatagaaacataca

SEQ ID NO: 16891 - DNA, 20 bp, synthetic construct
  misc_feature 1..20: note = Description of Artificial Sequence: Synthetic oligonucleotide
  misc_feature 1..20: note = Target: ANGPTL3; (+) strand; PAM type: YTN; PAM sequence: TTG
  source 1..20: mol_type = other DNA
tcattaatagaaacatacat

SEQ ID NO: 16892 - DNA, 20 bp, synthetic construct
  misc_feature 1..20: note = Description of Artificial Sequence: Synthetic oligonucleotide
  misc_feature 1..20: note = Target: ANGPTL3; (+) strand; PAM type: YTN; PAM sequence: TTA
  source 1..20: mol_type = other DNA
atagaaacatacatttacta

SEQ ID NO: 16893 - DNA, 20 bp, synthetic construct
  misc_feature 1..20: note = Description of Artificial Sequence: Synthetic oligonucleotide
  misc_feature 1..20: note = Target: ANGPTL3; (+) strand; PAM type: YTN; PAM sequence: TTT
  source 1..20: mol_type = other DNA
actattattattattattat

SEQ ID NO: 16894 - DNA, 20 bp, synthetic construct
  misc_feature 1..20: note = Description of Artificial Sequence: Synthetic oligonucleotide
  misc_feature 1..20: note = Target: ANGPTL3; (+) strand; PAM type: YTN; PAM sequence: TTA
  source 1..20: mol_type = other DNA
ctattattattattattatt

SEQ ID NO: 16895 - DNA, 20 bp, synthetic construct
  misc_feature 1..20: note = Description of Artificial Sequence: Synthetic oligonucleotide
  misc_feature 1..20: note = Target: ANGPTL3; (+) strand; PAM type: YTN; PAM sequence: CTA
  source 1..20: mol_type = other DNA
ttattattattattattata

SEQ ID NO: 16896 - DNA, 20 bp, synthetic construct
  misc_feature 1..20: note = Description of Artificial Sequence: Synthetic oligonucleotide
  misc_feature 1..20: note = Target: ANGPTL3; (+) strand; PAM type: YTN; PAM sequence: TTA
  source 1..20: mol_type = other DNA
ttattattattattatactt

SEQ ID NO: 16897 - DNA, 20 bp, synthetic construct
  misc_feature 1..20: note = Description of Artificial Sequence: Synthetic oligonucleotide
  misc_feature 1..20: note = Target: ANGPTL3; (+) strand; PAM type: YTN; PAM sequence: TTA
  source 1..20: mol_type = other DNA
ttattattattatactttaa

SEQ ID NO: 16898 - DNA, 20 bp, synthetic construct
  misc_feature 1..20: note = Description of Artificial Sequence: Synthetic oligonucleotide
  misc_feature 1..20: note = Target: ANGPTL3; (+) strand; PAM type: YTN; PAM sequence: TTA
  source 1..20: mol_type = other DNA
ttattattatactttaagtt

SEQ ID NO: 16899 - DNA, 20 bp, synthetic construct
  misc_feature 1..20: note = Description of Artificial Sequence: Synthetic oligonucleotide
  misc_feature 1..20: note = Target: ANGPTL3; (+) strand; PAM type: YTN; PAM sequence: TTA
  source 1..20: mol_type = other DNA
ttattatactttaagttctg

SEQ ID NO: 16900 - DNA, 20 bp, synthetic construct
  misc_feature 1..20: note = Description of Artificial Sequence: Synthetic oligonucleotide
  misc_feature 1..20: note = Target: ANGPTL3; (+) strand; PAM type: YTN; PAM sequence: TTA
  source 1..20: mol_type = other DNA
ttatactttaagttctggga

SEQ ID NO: 16901 - DNA, 20 bp, synthetic construct
  misc_feature 1..20: note = Description of Artificial Sequence: Synthetic oligonucleotide
  misc_feature 1..20: note = Target: ANGPTL3; (+) strand; PAM type: YTN; PAM sequence: TTA
  source 1..20: mol_type = other DNA
tactttaagttctgggatac

SEQ ID NO: 16902 - DNA, 20 bp, synthetic construct
  misc_feature 1..20: note = Description of Artificial Sequence: Synthetic oligonucleotide
  misc_feature 1..20: note = Target: ANGPTL3; (+) strand; PAM type: YTN; PAM sequence: CTT
  source 1..20: mol_type = other DNA
taagttctgggatacatgcg

SEQ ID NO: 16903 - DNA, 20 bp, synthetic construct
  misc_feature 1..20: note = Description of Artificial Sequence: Synthetic oligonucleotide
  misc_feature 1..20: note = Target: ANGPTL3; (+) strand; PAM type: YTN; PAM sequence: TTT
  source 1..20: mol_type = other DNA
aagttctgggatacatgcgc

SEQ ID NO: 16904 - DNA, 20 bp, synthetic construct
  misc_feature 1..20: note = Description of Artificial Sequence: Synthetic oligonucleotide
  misc_feature 1..20: note = Target: ANGPTL3; (+) strand; PAM type: YTN; PAM sequence: TTA
  source 1..20: mol_type = other DNA
agttctgggatacatgcgca

SEQ ID NO: 16905 - DNA, 20 bp, synthetic construct
  misc_feature 1..20: note = Description of Artificial Sequence: Synthetic oligonucleotide
  misc_feature 1..20: note = Target: ANGPTL3; (+) strand; PAM type: YTN; PAM sequence: TTC
  source 1..20: mol_type = other DNA
tgggatacatgcgcagaacg

SEQ ID NO: 16906 - DNA, 20 bp, synthetic construct
  misc_feature 1..20: note = Description of Artificial Sequence: Synthetic oligonucleotide
  misc_feature 1..20: note = Target: ANGPTL3; (+) strand; PAM type: YTN; PAM sequence: CTG
  source 1..20: mol_type = other DNA
ggatacatgcgcagaacgtg

SEQ ID NO: 16907 - DNA, 20 bp, synthetic construct
  misc_feature 1..20: note = Description of Artificial Sequence: Synthetic oligonucleotide
  misc_feature 1..20: note = Target: ANGPTL3; (+) strand; PAM type: YTN; PAM sequence: TTT
  source 1..20: mol_type = other DNA
tgttacataggtatacacgt

SEQ ID NO: 16908 - DNA, 20 bp, synthetic construct
  misc_feature 1..20: note = Description of Artificial Sequence: Synthetic oligonucleotide
  misc_feature 1..20: note = Target: ANGPTL3; (+) strand; PAM type: YTN; PAM sequence: TTT
  source 1..20: mol_type = other DNA
gttacataggtatacacgtg

SEQ ID NO: 16909 - DNA, 20 bp, synthetic construct
  misc_feature 1..20: note = Description of Artificial Sequence: Synthetic oligonucleotide
  misc_feature 1..20: note = Target: ANGPTL3; (+) strand; PAM type: YTN; PAM sequence: TTG
  source 1..20: mol_type = other DNA
ttacataggtatacacgtgg

SEQ ID NO: 16910 - DNA, 20 bp, synthetic construct
  misc_feature 1..20: note = Description of Artificial Sequence: Synthetic oligonucleotide
  misc_feature 1..20: note = Target: ANGPTL3; (+) strand; PAM type: YTN; PAM sequence: TTA
  source 1..20: mol_type = other DNA
cataggtatacacgtggtat

SEQ ID NO: 16911 - DNA, 20 bp, synthetic construct
  misc_feature 1..20: note = Description of Artificial Sequence: Synthetic oligonucleotide
  misc_feature 1..20: note = Target: ANGPTL3; (+) strand; PAM type: YTN; PAM sequence: TTT
  source 1..20: mol_type = other DNA
gctgcacccatcaacccgtc

SEQ ID NO: 16912 - DNA, 20 bp, synthetic construct
  misc_feature 1..20: note = Description of Artificial Sequence: Synthetic oligonucleotide
  misc_feature 1..20: note = Target: ANGPTL3; (+) strand; PAM type: YTN; PAM sequence: TTG
  source 1..20: mol_type = other DNA
ctgcacccatcaacccgtca

SEQ ID NO: 16913 - DNA, 20 bp, synthetic construct
  misc_feature 1..20: note = Description of Artificial Sequence: Synthetic oligonucleotide
  misc_feature 1..20: note = Target: ANGPTL3; (+) strand; PAM type: YTN; PAM sequence: CTG
  source 1..20: mol_type = other DNA
cacccatcaacccgtcatct

SEQ ID NO: 16914 - DNA, 20 bp, synthetic construct
  misc_feature 1..20: note = Description of Artificial Sequence: Synthetic oligonucleotide
  misc_feature 1..20: note = Target: ANGPTL3; (+) strand; PAM type: YTN; PAM sequence: CTA
  source 1..20: mol_type = other DNA
cattaggtatttctcctaat

SEQ ID NO: 16915 - DNA, 20 bp, synthetic construct
  misc_feature 1..20: note = Description of Artificial Sequence: Synthetic oligonucleotide
  misc_feature 1..20: note = Target: ANGPTL3; (+) strand; PAM type: YTN; PAM sequence: TTA
  source 1..20: mol_type = other DNA
ggtatttctcctaatgctat

SEQ ID NO: 16916 - DNA, 20 bp, synthetic construct
  misc_feature 1..20: note = Description of Artificial Sequence: Synthetic oligonucleotide
  misc_feature 1..20: note = Target: ANGPTL3; (+) strand; PAM type: YTN; PAM sequence: TTT
  source 1..20: mol_type = other DNA
ctcctaatgctatccctccc

SEQ ID NO: 16917 - DNA, 20 bp, synthetic construct
  misc_feature 1..20: note = Description of Artificial Sequence: Synthetic oligonucleotide
  misc_feature 1..20: note = Target: ANGPTL3; (+) strand; PAM type: YTN; PAM sequence: TTC
  source 1..20: mol_type = other DNA
tcctaatgctatccctcccc

SEQ ID NO: 16918 - DNA, 20 bp, synthetic construct
  misc_feature 1..20: note = Description of Artificial Sequence: Synthetic oligonucleotide
  misc_feature 1..20: note = Target: ANGPTL3; (+) strand; PAM type: YTN; PAM sequence: CTC
  source 1..20: mol_type = other DNA
ctaatgctatccctccccta

SEQ ID NO: 16919 - DNA, 20 bp, synthetic construct
  misc_feature 1..20: note = Description of Artificial Sequence: Synthetic oligonucleotide
  misc_feature 1..20: note = Target: ANGPTL3; (+) strand; PAM type: YTN; PAM sequence: CTA
  source 1..20: mol_type = other DNA
atgctatccctcccctagcc

SEQ ID NO: 16920 - DNA, 20 bp, synthetic construct
  misc_feature 1..20: note = Description of Artificial Sequence: Synthetic oligonucleotide
  misc_feature 1..20: note = Target: ANGPTL3; (+) strand; PAM type: YTN; PAM sequence: CTA
  source 1..20: mol_type = other DNA
tccctcccctagccccaccc

SEQ ID NO: 16921 - DNA, 20 bp, synthetic construct
  misc_feature 1..20: note = Description of Artificial Sequence: Synthetic oligonucleotide
  misc_feature 1..20: note = Target: ANGPTL3; (+) strand; PAM type: YTN; PAM sequence: CTC
  source 1..20: mol_type = other DNA
ccctagccccaccccgacag

SEQ ID NO: 16922 - DNA, 20 bp, synthetic construct
  misc_feature 1..20: note = Description of Artificial Sequence: Synthetic oligonucleotide
  misc_feature 1..20: note = Target: ANGPTL3; (+) strand; PAM type: YTN; PAM sequence: CTA
  source 1..20: mol_type = other DNA
gccccaccccgacaggtccc

SEQ ID NO: 16923 - DNA, 20 bp, synthetic construct
  misc_feature 1..20: note = Description of Artificial Sequence: Synthetic oligonucleotide
  misc_feature 1..20: note = Target: ANGPTL3; (+) strand; PAM type: YTN; PAM sequence: TTC
  source 1..20: mol_type = other DNA
ctttccctgtgtccatgtgt

SEQ ID NO: 16924 - DNA, 20 bp, synthetic construct
  misc_feature 1..20: note = Description of Artificial Sequence: Synthetic oligonucleotide
  misc_feature 1..20: note = Target: ANGPTL3; (+) strand; PAM type: YTN; PAM sequence: CTT
  source 1..20: mol_type = other DNA
tccctgtgtccatgtgttct

SEQ ID NO: 16925 - DNA, 20 bp, synthetic construct
  misc_feature 1..20: note = Description of Artificial Sequence: Synthetic oligonucleotide
  misc_feature 1..20: note = Target: ANGPTL3; (+) strand; PAM type: YTN; PAM sequence: TTT
  source 1..20: mol_type = other DNA
ccctgtgtccatgtgttctc

SEQ ID NO: 16926 - DNA, 20 bp, synthetic construct
  misc_feature 1..20: note = Description of Artificial Sequence: Synthetic oligonucleotide
  misc_feature 1..20: note = Target: ANGPTL3; (+) strand; PAM type: YTN; PAM sequence: TTC
  source 1..20: mol_type = other DNA
cctgtgtccatgtgttctca

SEQ ID NO: 16927 - DNA, 20 bp, synthetic construct
  misc_feature 1..20: note = Description of Artificial Sequence: Synthetic oligonucleotide
  misc_feature 1..20: note = Target: ANGPTL3; (+) strand; PAM type: YTN; PAM sequence: CTG
  source 1..20: mol_type = other DNA
tgtccatgtgttctcattgt

SEQ ID NO: 16928 - DNA, 20 bp, synthetic construct
  misc_feature 1..20: note = Description of Artificial Sequence: Synthetic oligonucleotide
  misc_feature 1..20: note = Target: ANGPTL3; (+) strand; PAM type: YTN; PAM sequence: TTC
  source 1..20: mol_type = other DNA
tcattgtttagctcccactt

SEQ ID NO: 16929 - DNA, 20 bp, synthetic construct
  misc_feature 1..20: note = Description of Artificial Sequence: Synthetic oligonucleotide
  misc_feature 1..20: note = Target: ANGPTL3; (+) strand; PAM type: YTN; PAM sequence: CTC
  source 1..20: mol_type = other DNA
attgtttagctcccacttat

SEQ ID NO: 16930 - DNA, 20 bp, synthetic construct
  misc_feature 1..20: note = Description of Artificial Sequence: Synthetic oligonucleotide
  misc_feature 1..20: note = Target: ANGPTL3; (+) strand; PAM type: YTN; PAM sequence: TTG
  source 1..20: mol_type = other DNA
tttagctcccacttatgagt

SEQ ID NO: 16931 - DNA, 20 bp, synthetic construct
  misc_feature 1..20: note = Description of Artificial Sequence: Synthetic oligonucleotide
  misc_feature 1..20: note = Target: ANGPTL3; (+) strand; PAM type: YTN; PAM sequence: TTT
  source 1..20: mol_type = other DNA
agctcccacttatgagtgag

SEQ ID NO: 16932 - DNA, 20 bp, synthetic construct
  misc_feature 1..20: note = Description of Artificial Sequence: Synthetic oligonucleotide
  misc_feature 1..20: note = Target: ANGPTL3; (+) strand; PAM type: YTN; PAM sequence: TTA
  source 1..20: mol_type = other DNA
gctcccacttatgagtgaga

SEQ ID NO: 16933 - DNA, 20 bp, synthetic construct
  misc_feature 1..20: note = Description of Artificial Sequence: Synthetic oligonucleotide
  misc_feature 1..20: note = Target: ANGPTL3; (+) strand; PAM type: YTN; PAM sequence: CTC
  source 1..20: mol_type = other DNA
ccacttatgagtgagaacat

SEQ ID NO: 16934 - DNA, 20 bp, synthetic construct
  misc_feature 1..20: note = Description of Artificial Sequence: Synthetic oligonucleotide
  misc_feature 1..20: note = Target: ANGPTL3; (+) strand; PAM type: YTN; PAM sequence: CTT
  source 1..20: mol_type = other DNA
atgagtgagaacatgtggtg

SEQ ID NO: 16935 - DNA, 20 bp, synthetic construct
  misc_feature 1..20: note = Description of Artificial Sequence: Synthetic oligonucleotide
  misc_feature 1..20: note = Target: ANGPTL3; (+) strand; PAM type: YTN; PAM sequence: TTA
  source 1..20: mol_type = other DNA
tgagtgagaacatgtggtgt

SEQ ID NO: 16936 - DNA, 20 bp, synthetic construct
  misc_feature 1..20: note = Description of Artificial Sequence: Synthetic oligonucleotide
  misc_feature 1..20: note = Target: ANGPTL3; (+) strand; PAM type: YTN; PAM sequence: TTT
  source 1..20: mol_type = other DNA
ggttttctgttcctgtgtta

SEQ ID NO: 16937 - DNA, 20 bp, synthetic construct
  misc_feature 1..20: note = Description of Artificial Sequence: Synthetic oligonucleotide
  misc_feature 1..20: note = Target: ANGPTL3; (+) strand; PAM type: YTN; PAM sequence: TTG
  source 1..20: mol_type = other DNA
gttttctgttcctgtgttag

SEQ ID NO: 16938 - DNA, 20 bp, synthetic construct
  misc_feature 1..20: note = Description of Artificial Sequence: Synthetic oligonucleotide
  misc_feature 1..20: note = Target: ANGPTL3; (+) strand; PAM type: YTN; PAM sequence: TTT
  source 1..20: mol_type = other DNA
tctgttcctgtgttagtttg

SEQ ID NO: 16939 - DNA, 20 bp, synthetic construct
  misc_feature 1..20: note = Description of Artificial Sequence: Synthetic oligonucleotide
  misc_feature 1..20: note = Target: ANGPTL3; (+) strand; PAM type: YTN; PAM sequence: TTT
  source 1..20: mol_type = other DNA
ctgttcctgtgttagtttgc

SEQ ID NO: 16940 - DNA, 20 bp, synthetic construct
  misc_feature 1..20: note = Description of Artificial Sequence: Synthetic oligonucleotide
  misc_feature 1..20: note = Target: ANGPTL3; (+) strand; PAM type: YTN; PAM sequence: TTC
  source 1..20: mol_type = other DNA
tgttcctgtgttagtttgct

SEQ ID NO: 16941 - DNA, 20 bp, synthetic construct
  misc_feature 1..20: note = Description of Artificial Sequence: Synthetic oligonucleotide
  misc_feature 1..20: note = Target: ANGPTL3; (+) strand; PAM type: YTN; PAM sequence: CTG
  source 1..20: mol_type = other DNA
ttcctgtgttagtttgctga

SEQ ID NO: 16942 - DNA, 20 bp, synthetic construct
  misc_feature 1..20: note = Description of Artificial Sequence: Synthetic oligonucleotide
  misc_feature 1..20: note = Target: ANGPTL3; (+) strand; PAM type: YTN; PAM sequence: TTC
  source 1..20: mol_type = other DNA
ctgtgttagtttgctgagaa

SEQ ID NO: 16943 - DNA, 20 bp, synthetic construct
  misc_feature 1..20: note = Description of Artificial Sequence: Synthetic oligonucleotide
  misc_feature 1..20: note = Target: ANGPTL3; (+) strand; PAM type: YTN; PAM sequence: CTG
  source 1..20: mol_type = other DNA
tgttagtttgctgagaatga

SEQ ID NO: 16944 - DNA, 20 bp, synthetic construct
  misc_feature 1..20: note = Description of Artificial Sequence: Synthetic oligonucleotide
  misc_feature 1..20: note = Target: ANGPTL3; (+) strand; PAM type: YTN; PAM sequence: TTA
  source 1..20: mol_type = other DNA
gtttgctgagaatgatggtt

SEQ ID NO: 16945 - DNA, 20 bp, synthetic construct
  misc_feature 1..20: note = Description of Artificial Sequence: Synthetic oligonucleotide
  misc_feature 1..20: note = Target: ANGPTL3; (+) strand; PAM type: YTN; PAM sequence: TTT
  source 1..20: mol_type = other DNA
gctgagaatgatggtttcca

SEQ ID NO: 16946 - DNA, 20 bp, synthetic construct
  misc_feature 1..20: note = Description of Artificial Sequence: Synthetic oligonucleotide
  misc_feature 1..20: note = Target: ANGPTL3; (+) strand; PAM type: YTN; PAM sequence: TTG
  source 1..20: mol_type = other DNA
ctgagaatgatggtttccag

SEQ ID NO: 16947 - DNA, 20 bp, synthetic construct
  misc_feature 1..20: note = Description of Artificial Sequence: Synthetic oligonucleotide
  misc_feature 1..20: note = Target: ANGPTL3; (+) strand; PAM type: YTN; PAM sequence: CTG
  source 1..20: mol_type = other DNA
agaatgatggtttccagctt

SEQ ID NO: 16948 - DNA, 20 bp, synthetic construct
  misc_feature 1..20: note = Description of Artificial Sequence: Synthetic oligonucleotide
  misc_feature 1..20: note = Target: ANGPTL3; (+) strand; PAM type: YTN; PAM sequence: TTT
  source 1..20: mol_type = other DNA
ccagcttcatccatgtccct

SEQ ID NO: 16949 - DNA, 20 bp, synthetic construct
  misc_feature 1..20: note = Description of Artificial Sequence: Synthetic oligonucleotide
  misc_feature 1..20: note = Target: ANGPTL3; (+) strand; PAM type: YTN; PAM sequence: TTC
  source 1..20: mol_type = other DNA
cagcttcatccatgtcccta

SEQ ID NO: 16950 - DNA, 20 bp, synthetic construct
  misc_feature 1..20: note = Description of Artificial Sequence: Synthetic oligonucleotide
  misc_feature 1..20: note = Target: ANGPTL3; (+) strand; PAM type: YTN; PAM sequence: CTT
  source 1..20: mol_type = other DNA
catccatgtccctacaaagg

SEQ ID NO: 16951 - DNA, 20 bp, synthetic construct
  misc_feature 1..20: note = Description of Artificial Sequence: Synthetic oligonucleotide
  misc_feature 1..20: note = Target: ANGPTL3; (+) strand; PAM type: YTN; PAM sequence: TTC
  source 1..20: mol_type = other DNA
atccatgtccctacaaagga

SEQ ID NO: 16952 - DNA, 20 bp, synthetic construct
  misc_feature 1..20: note = Description of Artificial Sequence: Synthetic oligonucleotide
  misc_feature 1..20: note = Target: ANGPTL3; (+) strand; PAM type: YTN; PAM sequence: CTA
  source 1..20: mol_type = other DNA
caaaggacatgaactcatcc

SEQ ID NO: 16953 - DNA, 20 bp, synthetic construct
  misc_feature 1..20: note = Description of Artificial Sequence: Synthetic oligonucleotide
  misc_feature 1..20: note = Target: ANGPTL3; (+) strand; PAM type: YTN; PAM sequence: CTC
  source 1..20: mol_type = other DNA
atccttttttatggctgcat

SEQ ID NO: 16954 - DNA, 20 bp, synthetic construct
  misc_feature 1..20: note = Description of Artificial Sequence: Synthetic oligonucleotide
  misc_feature 1..20: note = Target: ANGPTL3; (+) strand; PAM type: YTN; PAM sequence: CTT
  source 1..20: mol_type = other DNA
ttttatggctgcatagtatt

SEQ ID NO: 16955 - DNA, 20 bp, synthetic construct
  misc_feature 1..20: note = Description of Artificial Sequence: Synthetic oligonucleotide
  misc_feature 1..20: note = Target: ANGPTL3; (+) strand; PAM type: YTN; PAM sequence: TTT
  source 1..20: mol_type = other DNA
tttatggctgcatagtattc

SEQ ID NO: 16956 - DNA, 20 bp, synthetic construct
  misc_feature 1..20: note = Description of Artificial Sequence: Synthetic oligonucleotide
  misc_feature 1..20: note = Target: ANGPTL3; (+) strand; PAM type: YTN; PAM sequence: TTT
  source 1..20: mol_type = other DNA
ttatggctgcatagtattcc

SEQ ID NO: 16957 - DNA, 20 bp, synthetic construct
  misc_feature 1..20: note = Description of Artificial Sequence: Synthetic oligonucleotide
  misc_feature 1..20: note = Target: ANGPTL3; (+) strand; PAM type: YTN; PAM sequence: TTT
  source 1..20: mol_type = other DNA
tatggctgcatagtattcca

SEQ ID NO: 16958 - DNA, 20 bp, synthetic construct
  misc_feature 1..20: note = Description of Artificial Sequence: Synthetic oligonucleotide
  misc_feature 1..20: note = Target: ANGPTL3; (+) strand; PAM type: YTN; PAM sequence: TTT
  source 1..20: mol_type = other DNA
atggctgcatagtattccat

SEQ ID NO: 16959 - DNA, 20 bp, synthetic construct
  misc_feature 1..20: note = Description of Artificial Sequence: Synthetic oligonucleotide
  misc_feature 1..20: note = Target: ANGPTL3; (+) strand; PAM type: YTN; PAM sequence: TTA
  source 1..20: mol_type = other DNA
tggctgcatagtattccatg

SEQ ID NO: 16960 - DNA, 20 bp, synthetic construct
  misc_feature 1..20: note = Description of Artificial Sequence: Synthetic oligonucleotide
  misc_feature 1..20: note = Target: ANGPTL3; (+) strand; PAM type: YTN; PAM sequence: CTG
  source 1..20: mol_type = other DNA
catagtattccatggtgtat

SEQ ID NO: 16961 - DNA, 20 bp, synthetic construct
  misc_feature 1..20: note = Description of Artificial Sequence: Synthetic oligonucleotide
  misc_feature 1..20: note = Target: ANGPTL3; (+) strand; PAM type: YTN; PAM sequence: TTC
  source 1..20: mol_type = other DNA
catggtgtatatgtgccaca

SEQ ID NO: 16962 - DNA, 20 bp, synthetic construct
  misc_feature 1..20: note = Description of Artificial Sequence: Synthetic oligonucleotide
  misc_feature 1..20: note = Target: ANGPTL3; (+) strand; PAM type: YTN; PAM sequence: TTT
  source 1..20: mol_type = other DNA
tcttcatccagtctatcatt

SEQ ID NO: 16963 - DNA, 20 bp, synthetic construct
  misc_feature 1..20: note = Description of Artificial Sequence: Synthetic oligonucleotide
  misc_feature 1..20: note = Target: ANGPTL3; (+) strand; PAM type: YTN; PAM sequence: TTT
  source 1..20: mol_type = other DNA
cttcatccagtctatcattg

SEQ ID NO: 16964 - DNA, 20 bp, synthetic construct
  misc_feature 1..20: note = Description of Artificial Sequence: Synthetic oligonucleotide
  misc_feature 1..20: note = Target: ANGPTL3; (+) strand; PAM type: YTN; PAM sequence: TTC
  source 1..20: mol_type = other DNA
ttcatccagtctatcattga

SEQ ID NO: 16965 - DNA, 20 bp, synthetic construct
  misc_feature 1..20: note = Description of Artificial Sequence: Synthetic oligonucleotide
  misc_feature 1..20: note = Target: ANGPTL3; (+) strand; PAM type: YTN; PAM sequence: CTT
  source 1..20: mol_type = other DNA
catccagtctatcattgatg

SEQ ID NO: 16966 - DNA, 20 bp, synthetic construct
  misc_feature 1..20: note = Description of Artificial Sequence: Synthetic oligonucleotide
  misc_feature 1..20: note = Target: ANGPTL3; (+) strand; PAM type: YTN; PAM sequence: TTC
  source 1..20: mol_type = other DNA
atccagtctatcattgatgg

SEQ ID NO: 16967 - DNA, 20 bp, synthetic construct
  misc_feature 1..20: note = Description of Artificial Sequence: Synthetic oligonucleotide
  misc_feature 1..20: note = Target: ANGPTL3; (+) strand; PAM type: YTN; PAM sequence: CTA
  source 1..20: mol_type = other DNA
tcattgatgggcatttgggt

SEQ ID NO: 16968 - DNA, 20 bp, synthetic construct
  misc_feature 1..20: note = Description of Artificial Sequence: Synthetic oligonucleotide
  misc_feature 1..20: note = Target: ANGPTL3; (+) strand; PAM type: YTN; PAM sequence: TTG
  source 1..20: mol_type = other DNA
atgggcatttgggttggttc

SEQ ID NO: 16969 - DNA, 20 bp, synthetic construct
  misc_feature 1..20: note = Description of Artificial Sequence: Synthetic oligonucleotide
  misc_feature 1..20: note = Target: ANGPTL3; (+) strand; PAM type: YTN; PAM sequence: TTT
  source 1..20: mol_type = other DNA
gggttggttccaagtctttg

SEQ ID NO: 16970 - DNA, 20 bp, synthetic construct
  misc_feature 1..20: note = Description of Artificial Sequence: Synthetic oligonucleotide
  misc_feature 1..20: note = Target: ANGPTL3; (+) strand; PAM type: YTN; PAM sequence: TTG
  source 1..20: mol_type = other DNA
ggttggttccaagtctttgt

SEQ ID NO: 16971 - DNA, 20 bp, synthetic construct
  misc_feature 1..20: note = Description of Artificial Sequence: Synthetic oligonucleotide
  misc_feature 1..20: note = Target: ANGPTL3; (+) strand; PAM type: YTN; PAM sequence: TTG
  source 1..20: mol_type = other DNA
gttccaagtctttgttattg

SEQ ID NO: 16972 - DNA, 20 bp, synthetic construct
  misc_feature 1..20: note = Description of Artificial Sequence: Synthetic oligonucleotide
  misc_feature 1..20: note = Target: ANGPTL3; (+) strand; PAM type: YTN; PAM sequence: TTC
  source 1..20: mol_type = other DNA
caagtctttgttattgtgaa

SEQ ID NO: 16973 - DNA, 20 bp, synthetic construct
  misc_feature 1..20: note = Description of Artificial Sequence: Synthetic oligonucleotide
  misc_feature 1..20: note = Target: ANGPTL3; (+) strand; PAM type: YTN; PAM sequence: CTT
  source 1..20: mol_type = other DNA
tgttattgtgaatagtgctg

SEQ ID NO: 16974 - DNA, 20 bp, synthetic construct
  misc_feature 1..20: note = Description of Artificial Sequence: Synthetic oligonucleotide
  misc_feature 1..20: note = Target: ANGPTL3; (+) strand; PAM type: YTN; PAM sequence: TTT
  source 1..20: mol_type = other DNA
gttattgtgaatagtgctgc

SEQ ID NO: 16975 - DNA, 20 bp, synthetic construct
  misc_feature 1..20: note = Description of Artificial Sequence: Synthetic oligonucleotide
  misc_feature 1..20: note = Target: ANGPTL3; (+) strand; PAM type: YTN; PAM sequence: TTG
  source 1..20: mol_type = other DNA
ttattgtgaatagtgctgca

SEQ ID NO: 16976 - DNA, 20 bp, synthetic construct
  misc_feature 1..20: note = Description of Artificial Sequence: Synthetic oligonucleotide
  misc_feature 1..20: note = Target: ANGPTL3; (+) strand; PAM type: YTN; PAM sequence: TTA
  source 1..20: mol_type = other DNA
ttgtgaatagtgctgcaata

SEQ ID NO: 16977 - DNA, 20 bp, synthetic construct
  misc_feature 1..20: note = Description of Artificial Sequence: Synthetic oligonucleotide
  misc_feature 1..20: note = Target: ANGPTL3; (+) strand; PAM type: YTN; PAM sequence: TTG
  source 1..20: mol_type = other DNA
tgaatagtgctgcaataaac

SEQ ID NO: 16978 - DNA, 20 bp, synthetic construct
  misc_feature 1..20: note = Description of Artificial Sequence: Synthetic oligonucleotide
  misc_feature 1..20: note = Target: ANGPTL3; (+) strand; PAM type: YTN; PAM sequence: CTG
  source 1..20: mol_type = other DNA
caataaacatgtgtgcatgt

SEQ ID NO: 16979 - DNA, 20 bp, synthetic construct
  misc_feature 1..20: note = Description of Artificial Sequence: Synthetic oligonucleotide
  misc_feature 1..20: note = Target: ANGPTL3; (+) strand; PAM type: YTN; PAM sequence: CTT
  source 1..20: mol_type = other DNA
tatagtagaatgatttataa

SEQ ID NO: 16980 - DNA, 20 bp, synthetic construct
  misc_feature 1..20: note = Description of Artificial Sequence: Synthetic oligonucleotide
  misc_feature 1..20: note = Target: ANGPTL3; (+) strand; PAM type: YTN; PAM sequence: TTT
  source 1..20: mol_type = other DNA
atagtagaatgatttataat

SEQ ID NO: 16981 - DNA, 20 bp, synthetic construct
  misc_feature 1..20: note = Description of Artificial Sequence: Synthetic oligonucleotide
  misc_feature 1..20: note = Target: ANGPTL3; (+) strand; PAM type: YTN; PAM sequence: TTA
  source 1..20: mol_type = other DNA
tagtagaatgatttataatc

SEQ ID NO: 16982 - DNA, 20 bp, synthetic construct
  misc_feature 1..20: note = Description of Artificial Sequence: Synthetic oligonucleotide
  misc_feature 1..20: note = Target: ANGPTL3; (+) strand; PAM type: YTN; PAM sequence: TTT
  source 1..20: mol_type = other DNA
ataatcctttgaatatatac

SEQ ID NO: 16983 - DNA, 20 bp, synthetic construct
  misc_feature 1..20: note = Description of Artificial Sequence: Synthetic oligonucleotide
  misc_feature 1..20: note = Target: ANGPTL3; (+) strand; PAM type: YTN; PAM sequence: TTA
  source 1..20: mol_type = other DNA
taatcctttgaatatatacc

SEQ ID NO: 16984 - DNA, 20 bp, synthetic construct
  misc_feature 1..20: note = Description of Artificial Sequence: Synthetic oligonucleotide
  misc_feature 1..20: note = Target: ANGPTL3; (+) strand; PAM type: YTN; PAM sequence: CTT
  source 1..20: mol_type = other DNA
tgaatatatacccaataatg

SEQ ID NO: 16985 - DNA, 20 bp, synthetic construct
  misc_feature 1..20: note = Description of Artificial Sequence: Synthetic oligonucleotide
  misc_feature 1..20: note = Target: ANGPTL3; (+) strand; PAM type: YTN; PAM sequence: TTT
  source 1..20: mol_type = other DNA
gaatatatacccaataatgg

SEQ ID NO: 16986 - DNA, 20 bp, synthetic construct
  misc_feature 1..20: note = Description of Artificial Sequence: Synthetic oligonucleotide
  misc_feature 1..20: note = Target: ANGPTL3; (+) strand; PAM type: YTN; PAM sequence: TTG
  source 1..20: mol_type = other DNA
aatatatacccaataatggg

SEQ ID NO: 16987 - DNA, 20 bp, synthetic construct
  misc_feature 1..20: note = Description of Artificial Sequence: Synthetic oligonucleotide
  misc_feature 1..20: note = Target: ANGPTL3; (+) strand; PAM type: YTN; PAM sequence: TTA
  source 1..20: mol_type = other DNA
ctgggtcaaatggtatttct

SEQ ID NO: 16988 - DNA, 20 bp, synthetic construct
  misc_feature 1..20: note = Description of Artificial Sequence: Synthetic oligonucleotide
  misc_feature 1..20: note = Target: ANGPTL3; (+) strand; PAM type: YTN; PAM sequence: CTG
  source 1..20: mol_type = other DNA
ggtcaaatggtatttctagt

SEQ ID NO: 16989 - DNA, 20 bp, synthetic construct
  misc_feature 1..20: note = Description of Artificial Sequence: Synthetic oligonucleotide
  misc_feature 1..20: note = Target: ANGPTL3; (+) strand; PAM type: YTN; PAM sequence: TTT
  source 1..20: mol_type = other DNA
ctagttctagttccttgagg

SEQ ID NO: 16990 - DNA, 20 bp, synthetic construct
  misc_feature 1..20: note = Description of Artificial Sequence: Synthetic oligonucleotide
  misc_feature 1..20: note = Target: ANGPTL3; (+) strand; PAM type: YTN; PAM sequence: TTC
  source 1..20: mol_type = other DNA
tagttctagttccttgagga

SEQ ID NO: 16991 - DNA, 20 bp, synthetic construct
  misc_feature 1..20: note = Description of Artificial Sequence: Synthetic oligonucleotide
  misc_feature 1..20: note = Target: ANGPTL3; (+) strand; PAM type: YTN; PAM sequence: CTA
  source 1..20: mol_type = other DNA
gttctagttccttgaggaat

SEQ ID NO: 16992 - DNA, 20 bp, synthetic construct
  misc_feature 1..20: note = Description of Artificial Sequence: Synthetic oligonucleotide
  misc_feature 1..20: note = Target: ANGPTL3; (+) strand; PAM type: YTN; PAM sequence: TTC
  source 1..20: mol_type = other DNA
tagttccttgaggaatcgcc

SEQ ID NO: 16993 - DNA, 20 bp, synthetic construct
  misc_feature 1..20: note = Description of Artificial Sequence: Synthetic oligonucleotide
  misc_feature 1..20: note = Target: ANGPTL3; (+) strand; PAM type: YTN; PAM sequence: CTA
  source 1..20: mol_type = other DNA
gttccttgaggaatcgccac

SEQ ID NO: 16994 - DNA, 20 bp, synthetic construct
  misc_feature 1..20: note = Description of Artificial Sequence: Synthetic oligonucleotide
  misc_feature 1..20: note = Target: ANGPTL3; (+) strand; PAM type: YTN; PAM sequence: TTC
  source 1..20: mol_type = other DNA
cttgaggaatcgccacactg

SEQ ID NO: 16995 - DNA, 20 bp, synthetic construct
  misc_feature 1..20: note = Description of Artificial Sequence: Synthetic oligonucleotide
  misc_feature 1..20: note = Target: ANGPTL3; (+) strand; PAM type: YTN; PAM sequence: CTT
  source 1..20: mol_type = other DNA
gaggaatcgccacactgtct

SEQ ID NO: 16996 - DNA, 20 bp, synthetic construct
  misc_feature 1..20: note = Description of Artificial Sequence: Synthetic oligonucleotide
  misc_feature 1..20: note = Target: ANGPTL3; (+) strand; PAM type: YTN; PAM sequence: TTG
  source 1..20: mol_type = other DNA
aggaatcgccacactgtctt

SEQ ID NO: 16997 - DNA, 20 bp, synthetic construct
  misc_feature 1..20: note = Description of Artificial Sequence: Synthetic oligonucleotide
  misc_feature 1..20: note = Target: ANGPTL3; (+) strand; PAM type: YTN; PAM sequence: CTG
  source 1..20: mol_type = other DNA
tcttccacaatggttgaact

SEQ ID NO: 16998 - DNA, 20 bp, synthetic construct
  misc_feature 1..20: note = Description of Artificial Sequence: Synthetic oligonucleotide
  misc_feature 1..20: note = Target: ANGPTL3; (+) strand; PAM type: YTN; PAM sequence: CTT
  source 1..20: mol_type = other DNA
ccacaatggttgaactaatt

SEQ ID NO: 16999 - DNA, 20 bp, synthetic construct
  misc_feature 1..20: note = Description of Artificial Sequence: Synthetic oligonucleotide
  misc_feature 1..20: note = Target: ANGPTL3; (+) strand; PAM type: YTN; PAM sequence: TTC
  source 1..20: mol_type = other DNA
cacaatggttgaactaattt

SEQ ID NO: 17000 - DNA, 20 bp, synthetic construct
  misc_feature 1..20: note = Description of Artificial Sequence: Synthetic oligonucleotide
  misc_feature 1..20: note = Target: ANGPTL3; (+) strand; PAM type: YTN; PAM sequence: TTG
  source 1..20: mol_type = other DNA
aactaatttgaaacatacat

SEQ ID NO: 17001 - DNA, 20 bp, synthetic construct
  misc_feature 1..20: note = Description of Artificial Sequence: Synthetic oligonucleotide
  misc_feature 1..20: note = Target: ANGPTL3; (+) strand; PAM type: YTN; PAM sequence: CTA
  source 1..20: mol_type = other DNA
atttgaaacatacatatttt

SEQ ID NO: 17002 - DNA, 20 bp, synthetic construct
  misc_feature 1..20: note = Description of Artificial Sequence: Synthetic oligonucleotide
  misc_feature 1..20: note = Target: ANGPTL3; (+) strand; PAM type: YTN; PAM sequence: TTT
  source 1..20: mol_type = other DNA
gaaacatacatatttttata

SEQ ID NO: 17003 - DNA, 20 bp, synthetic construct
  misc_feature 1..20: note = Description of Artificial Sequence: Synthetic oligonucleotide
  misc_feature 1..20: note = Target: ANGPTL3; (+) strand; PAM type: YTN; PAM sequence: TTG
  source 1..20: mol_type = other DNA
aaacatacatatttttatat

SEQ ID NO: 17004 - DNA, 20 bp, synthetic construct
  misc_feature 1..20: note = Description of Artificial Sequence: Synthetic oligonucleotide
  misc_feature 1..20: note = Target: ANGPTL3; (+) strand; PAM type: YTN; PAM sequence: TTT
  source 1..20: mol_type = other DNA
ttatatcacaactattatag

SEQ ID NO: 17005 - DNA, 20 bp, synthetic construct
  misc_feature 1..20: note = Description of Artificial Sequence: Synthetic oligonucleotide
  misc_feature 1..20: note = Target: ANGPTL3; (+) strand; PAM type: YTN; PAM sequence: TTT
  source 1..20: mol_type = other DNA
tatatcacaactattataga

SEQ ID NO: 17006 - DNA, 20 bp, synthetic construct
  misc_feature 1..20: note = Description of Artificial Sequence: Synthetic oligonucleotide
  misc_feature 1..20: note = Target: ANGPTL3; (+) strand; PAM type: YTN; PAM sequence: TTT
  source 1..20: mol_type = other DNA
atatcacaactattatagac

SEQ ID NO: 17007 - DNA, 20 bp, synthetic construct
  misc_feature 1..20: note = Description of Artificial Sequence: Synthetic oligonucleotide
  misc_feature 1..20: note = Target: ANGPTL3; (+) strand; PAM type: YTN; PAM sequence: TTA
  source 1..20: mol_type = other DNA
tatcacaactattatagaca

SEQ ID NO: 17008 - DNA, 20 bp, synthetic construct
  misc_feature 1..20: note = Description of Artificial Sequence: Synthetic oligonucleotide
  misc_feature 1..20: note = Target: ANGPTL3; (+) strand; PAM type: YTN; PAM sequence: CTA
  source 1..20: mol_type = other DNA
ttatagacatctcaaaatat

SEQ ID NO: 17009 - DNA, 20 bp, synthetic construct
  misc_feature 1..20: note = Description of Artificial Sequence: Synthetic oligonucleotide
  misc_feature 1..20: note = Target: ANGPTL3; (+) strand; PAM type: YTN; PAM sequence: TTA
  source 1..20: mol_type = other DNA
tagacatctcaaaatattgt

SEQ ID NO: 17010 - DNA, 20 bp, synthetic construct
  misc_feature 1..20: note = Description of Artificial Sequence: Synthetic oligonucleotide
  misc_feature 1..20: note = Target: ANGPTL3; (+) strand; PAM type: YTN; PAM sequence: CTC
  source 1..20: mol_type = other DNA
aaaatattgttgatgcttat

SEQ ID NO: 17011 - DNA, 20 bp, synthetic construct
  misc_feature 1..20: note = Description of Artificial Sequence: Synthetic oligonucleotide
  misc_feature 1..20: note = Target: ANGPTL3; (+) strand; PAM type: YTN; PAM sequence: TTG
  source 1..20: mol_type = other DNA
ttgatgcttattactattta

SEQ ID NO: 17012 - DNA, 20 bp, synthetic construct
  misc_feature 1..20: note = Description of Artificial Sequence: Synthetic oligonucleotide
  misc_feature 1..20: note = Target: ANGPTL3; (+) strand; PAM type: YTN; PAM sequence: TTG
  source 1..20: mol_type = other DNA
atgcttattactatttagaa

SEQ ID NO: 17013 - DNA, 20 bp, synthetic construct
  misc_feature 1..20: note = Description of Artificial Sequence: Synthetic oligonucleotide
  misc_feature 1..20: note = Target: ANGPTL3; (+) strand; PAM type: YTN; PAM sequence: CTT
  source 1..20: mol_type = other DNA
attactatttagaaaataca

SEQ ID NO: 17014 - DNA, 20 bp, synthetic construct
  misc_feature 1..20: note = Description of Artificial Sequence: Synthetic oligonucleotide
  misc_feature 1..20: note = Target: ANGPTL3; (+) strand; PAM type: YTN; PAM sequence: TTA
  source 1..20: mol_type = other DNA
ttactatttagaaaatacaa

SEQ ID NO: 17015 - DNA, 20 bp, synthetic construct
  misc_feature 1..20: note = Description of Artificial Sequence: Synthetic oligonucleotide
  misc_feature 1..20: note = Target: ANGPTL3; (+) strand; PAM type: YTN; PAM sequence: TTA
  source 1..20: mol_type = other DNA
ctatttagaaaatacaatag

SEQ ID NO: 17016 - DNA, 20 bp, synthetic construct
  misc_feature 1..20: note = Description of Artificial Sequence: Synthetic oligonucleotide
  misc_feature 1..20: note = Target: ANGPTL3; (+) strand; PAM type: YTN; PAM sequence: CTA
  source 1..20: mol_type = other DNA
tttagaaaatacaatagttt

SEQ ID NO: 17017 - DNA, 20 bp, synthetic construct
  misc_feature 1..20: note = Description of Artificial Sequence: Synthetic oligonucleotide
  misc_feature 1..20: note = Target: ANGPTL3; (+) strand; PAM type: YTN; PAM sequence: TTT
  source 1..20: mol_type = other DNA
agaaaatacaatagtttttt

SEQ ID NO: 17018 - DNA, 20 bp, synthetic construct
  misc_feature 1..20: note = Description of Artificial Sequence: Synthetic oligonucleotide
  misc_feature 1..20: note = Target: ANGPTL3; (+) strand; PAM type: YTN; PAM sequence: TTA
  source 1..20: mol_type = other DNA
gaaaatacaatagtttttta

SEQ ID NO: 17019-17049 - skipped (31 entries)

SEQ ID NO: 17050 - RNA, 100 nt, synthetic construct
  misc_feature 1..20: note = n is a, c, g, or u
  source 1..100: mol_type = other RNA
  misc_feature 1..100: note = Artificial Polynucleotide
nnnnnnnnnnnnnnnnnnnngttttagagctagaaatagcaagttaaaataaggctagtccgttatcaacttgaaaaagtggcaccgagtcggtgctttt

SEQ ID NO: 17051 - RNA, 96 nt, synthetic construct
  misc_feature 1..96: note = Artificial Polynucleotide
  misc_feature 1..20: note = n is a, c, g, or u
  source 1..96: mol_type = other RNA
nnnnnnnnnnnnnnnnnnnngttttagagctagaaatagcaagttaaaataaggctagtccgttatcaacttgaaaaagtggcaccgagtcggtgc

SEQ ID NO: 17052 - RNA, 114 nt, synthetic construct
  misc_feature 1..114: note = Artificial Polynucleotide
  misc_feature 18..30: note = nucleotides from position 18 to 30 may be absent
  misc_feature 108..114: note = uridines from position 108 to 114 may be absent
  source 1..114: mol_type = other RNA
nnnnnnnnnnnnnnnnnnnnnnnnnnnnnngttttagagctagaaatagcaagttaaaataaggctagtccgttatcaacttgaaaaagtggcaccgagtcggtgctttttttt

SEQ ID NO: 17053 - skipped

SEQ ID NO: 17054 - DNA, 20 bp, Homo sapiens
  source 1..20: mol_type = genomic DNA
gactttgtccataagacgaa

SEQ ID NO: 17055 - DNA, 20 bp, Homo sapiens
  source 1..20: mol_type = genomic DNA
gccaatggcctccttcagtt

SEQ ID NO: 17056 - DNA, 20 bp, Homo sapiens
  source 1..20: mol_type = genomic DNA
ggcctccttcagttgggaca

SEQ ID NO: 17057 - DNA, 20 bp, Homo sapiens
  source 1..20: mol_type = genomic DNA
caaagaccttctccagaccg

SEQ ID NO: 17058 - RNA, 100 nt, synthetic construct; identical to SEQ ID NO: 17050
  misc_feature 1..100: note = Artificial Polynucleotide
  modified_base 1..3: mod_base = OTHER; note = is a 2'-O-methyl phosphorothioate nucleotide
  misc_feature 1..20: note = n is a, c, g, or u
  modified_base 29..32: mod_base = OTHER; note = nucleotides have a 2'-O-methyl modification
  modified_base 37..40: mod_base = OTHER; note = nucleotides have a 2'-O-methyl modification
  modified_base 68..72: mod_base = OTHER; note = nucleotides have a 2'-O-methyl modification
  modified_base 77..96: mod_base = OTHER; note = nucleotides have a 2'-O-methyl modification
  modified_base 97..99: mod_base = OTHER; note = is a 2'-O-methyl phosphorothioate uracil
  source 1..100: mol_type = other RNA

SEQ ID NO: 17059 - RNA, 100 nt, synthetic construct
  misc_feature 1..100: note = Artificial Polypeptide
  modified_base 1: mod_base = OTHER; note = is a 2'-O-methyl phosphorothioate guanine
  modified_base 2: mod_base = OTHER; note = is a 2'-O-methyl phosphorothioate adenosine
  modified_base 3: mod_base = OTHER; note = is a 2'-O-methyl phosphorothioate cytosine
  modified_base 29..32: mod_base = OTHER; note = nucleotides have a 2'-O-methyl modification
  modified_base 37..40: mod_base = OTHER; note = nucleotides have a 2'-O-methyl modification
  modified_base 68..72: mod_base = OTHER; note = nucleotides have a 2'-O-methyl modification
  modified_base 77..96: mod_base = OTHER; note = nucleotides have a 2'-O-methyl modification
  modified_base 97..99: mod_base = OTHER; note = is a 2'-O-methyl phosphorothioate uracil
  source 1..100: mol_type = other RNA
gactttgtccataagacgaagttttagagctagaaatagcaagttaaaataaggctagtccgttatcaacttgaaaaagtggcaccgagtcggtgctttt

SEQ ID NO: 17060 - RNA, 100 nt, synthetic construct
  misc_feature 1..100: note = Artificial Polypeptide
  modified_base 1: mod_base = OTHER; note = is a 2'-O-methyl phosphorothioate guanine
  modified_base 2..3: mod_base = OTHER; note = is a 2'-O-methyl phosphorothioate cytosine
  modified_base 29..32: mod_base = OTHER; note = nucleotides have a 2'-O-methyl modification
  modified_base 37..40: mod_base = OTHER; note = nucleotides have a 2'-O-methyl modification
  modified_base 68..72: mod_base = OTHER; note = nucleotides have a 2'-O-methyl modification
  modified_base 77..96: mod_base = OTHER; note = nucleotides have a 2'-O-methyl modification
  modified_base 97..99: mod_base = OTHER; note = is a 2'-O-methyl phosphorothioate uracil
  source 1..100: mol_type = other RNA
gccaatggcctccttcagttgttttagagctagaaatagcaagttaaaataaggctagtccgttatcaacttgaaaaagtggcaccgagtcggtgctttt

SEQ ID NO: 17061 - RNA, 100 nt, synthetic construct
  misc_feature 1..100: note = Artificial Polynucleotide
  modified_base 1..2: mod_base = OTHER; note = is a 2'-O-methyl phosphorothioate guanine
  modified_base 3: mod_base = OTHER; note = is a 2'-O-methyl phosphorothioate cytosine
  modified_base 29..32: mod_base = OTHER; note = nucleotides have a 2'-O-methyl modification
  modified_base 37..40: mod_base = OTHER; note = nucleotides have a 2'-O-methyl modification
  modified_base 68..72: mod_base = OTHER; note = nucleotides have a 2'-O-methyl modification
  modified_base 77..96: mod_base = OTHER; note = nucleotides have a 2'-O-methyl modification
  modified_base 97..99: mod_base = OTHER; note = is a 2'-O-methyl phosphorothioate uracil
  source 1..100: mol_type = other RNA
ggcctccttcagttgggacagttttagagctagaaatagcaagttaaaataaggctagtccgttatcaacttgaaaaagtggcaccgagtcggtgctttt

SEQ ID NO: 17062 - RNA, 100 nt, synthetic construct
  misc_feature 1..100: note = Artificial Polynucleotide
  modified_base 1: mod_base = OTHER; note = is a 2'-O-methyl phosphorothioate cytosine
  modified_base 2..3: mod_base = OTHER; note = is a 2'-O-methyl phosphorothioate adenosine
  modified_base 29..32: mod_base = OTHER; note = nucleotides have a 2'-O-methyl modification
  modified_base 37..40: mod_base = OTHER; note = nucleotides have a 2'-O-methyl modification
  modified_base 68..72: mod_base = OTHER; note = nucleotides have a 2'-O-methyl modification
  modified_base 77..96: mod_base = OTHER; note = nucleotides have a 2'-O-methyl modification
  modified_base 97..99: mod_base = OTHER; note = is a 2'-O-methyl phosphorothioate uracil
  source 1..100: mol_type = other RNA
caaagaccttctccagaccggttttagagctagaaatagcaagttaaaataaggctagtccgttatcaacttgaaaaagtggcaccgagtcggtgctttt

SEQ ID NO: 17063 - RNA, 100 nt, synthetic construct; identical to SEQ ID NO: 17059
  misc_feature 1..100: note = Artificial Polynucleotide
  source 1..100: mol_type = other RNA

SEQ ID NO: 17064 - RNA, 100 nt, synthetic construct; identical to SEQ ID NO: 17060
  misc_feature 1..100: note = Artificial Polynucleotide
  source 1..100: mol_type = other RNA

SEQ ID NO: 17065 - RNA, 100 nt, synthetic construct; identical to SEQ ID NO: 17061
  misc_feature 1..100: note = Artificial Polynucleotide
  source 1..100: mol_type = other RNA

SEQ ID NO: 17066 - RNA, 100 nt, synthetic construct; identical to SEQ ID NO: 17062
  misc_feature 1..100: note = Artificial Polynucleotide
  source 1..100: mol_type = other RNA

SEQ ID NO: 17067 - skipped

SEQ ID NO: 17068 - RNA, 20 nt, synthetic construct
  misc_feature 1..20: note = Artificial Polynucleotide
  source 1..20: mol_type = other RNA
gactttgtccataagacgaa

SEQ ID NO: 17069 - RNA, 20 nt, synthetic construct
  misc_feature 1..20: note = Artificial Polynucleotide
  source 1..20: mol_type = other RNA
gccaatggcctccttcagtt

SEQ ID NO: 17070 - RNA, 20 nt, synthetic construct
  misc_feature 1..20: note = Artificial Polynucleotide
  source 1..20: mol_type = other RNA
ggcctccttcagttgggaca

SEQ ID NO: 17071 - RNA, 20 nt, synthetic construct
  misc_feature 1..20: note = Artificial Polynucleotide
  source 1..20: mol_type = other RNA
caaagaccttctccagaccg
